(19) United States
(12) Patent Application Publication
(10) Pub. No.: US 2023/0043046 A1
(43) Pub. Date: Feb. 9, 2023

(54) Recombinant CDKL5 Proteins, Gene Therapy and Production Methods

(71) Applicant: Amicus Therapeutics, Inc., Philadelphia, PA (US)

(72) Inventors: Sean Clark, Montgomery Township, NJ (US); Sean Sullivan, Milltown, NJ (US); Hilary Gray, Philadelphia, PA (US)

(73) Assignee: Amicus Therapeutics, Inc., Philadelphia, PA (US)

(21) Appl. No.: 17/773,416

(22) PCT Filed: Oct. 30, 2020
(86) PCT No.: PCT/US20/58247

§ 371 Date: Apr. 29, 2022

Related U.S. Application Data
(60) Provisional application No. 62/928,134, filed on Oct. 30, 2019.
(60) Provisional application No. 62/928,140, filed on Oct. 30, 2019.
(60) Provisional application No. 63/090,520, filed on Oct. 12, 2020.

(51) Int. Cl. A61K 48/00; A61P 25/28; C12N 9/12; C12N 15/86

(52) U.S. Cl. CPC A61K 48/0025; A61P 25/28; C12N 9/12; C12N 15/86; C12Y 207/11; A61K 38/00

(57) ABSTRACT

Compositions for CDKL5 gene therapy are provided, as well as recombinant CDKL5 proteins. Such CDKL5 gene therapy compositions and/or recombinant CDKL5 proteins may incorporate cell-penetrating polypeptides and/or leader signal polypeptides. Also provided are methods of producing such gene therapy compositions and recombinant CDKL5 proteins, as well as pharmaceutical compositions, methods of treatment, and uses of the gene therapy compositions and recombinant CDKL5 proteins.

### TECHNICAL FIELD

[0001] The present invention generally relates to the treatment of kinase deficiency disorders, particularly novel recombinant proteins and gene therapy for the treatment of disorders involving deficiency of CDKL5.

### BACKGROUND

[0002] CDKL5 is a serine/threonine kinase and was previously known as STK9. Mutations in this gene have recently been associated with a number of neurological disorders such as mental retardation, loss of communication and motor skills, infantile spasms and seizures, atypical Rett Syndrome, and X-linked West Syndromes. Mutations or deletions of the X-linked gene cyclin-dependent kinase-like 5 (CDKL5) have been shown to cause an epileptic encephalopathy with early-onset severe neurological impairment and intractable seizures.

[0003] Currently, the oldest known people described in medical literature with CDKL5 deficiency have reached an age of 41 years old. Many others are in their twenties and teens, but because the disease has only been identified in the last 15 years, the majority of newly diagnosed are toddlers or infants. Individuals diagnosed with CDKL5 deficiency disorder generally suffer delays in neurological development and are at a high risk for seizures, with a median onset age of 6 weeks. One study of 111 participants found that 85.6% of individuals had epilepsy with a daily occurrence of seizures, and a mean of 6 seizures per day.

[0004] Current treatments range from seizure medications, ketogenic diets, vagal nerve stimulation, and surgery. Commonly administered anti-epileptic medications include clobazam, valproic acid, and topiramate, and in many cases two or more medication regiments are used at the same time. Individuals seemed to have a “honeymoon period” in which they are seizure free for a period of time after starting a new type of medication, but ultimately there is a recurrence of seizures. The duration of observed honeymoon ranges from 2 months to 7 years, with a median of 6 months. For example, the study found that 16 of the 111 participants were currently seizure free, and one individual had never developed seizures.

[0005] The exact mechanisms for pathogenic manifestations remain unclear. Some experimental data suggest that certain non-sense mutations in the C-terminus cause the protein to be constitutively localized to the nucleus, while other missense mutations are highly represented in the cytoplasm. Nuclear localization signals and nuclear export signals have both been identified in the C-terminus of the protein.

[0006] Some mutant enzyme variants result in partial or total loss of phosphorylation function, while other mutations and truncations result in an increase in phosphorylation capacity, suggesting that both loss and gain of function may be pathogenic. Interactions and pathogenic effects arising from enzymatic activity loss/gain of function and enzyme nuclear localization versus residence in the cytoplasm remain unclear. An analysis of patients with a wide range of CDKL5 mutations and presenting clinical symptoms suggests that mutations causing clinical symptoms are more likely to be found either in the C-terminus or the kinase activity domain, suggesting that both the kinase activity and protein translocation capacity of CDKL5 could affect the clinical manifestation of symptoms.

### SUMMARY

[0007] Accordingly, various aspects of the invention pertain to new recombinant CDKL5 proteins and gene therapy compositions, which can be used to treat CDKL5-mediated neurological disorders such as a CDKL5 deficiency or an atypical Rett syndrome caused by a CDKL5 mutation or deficiency. Other aspects of the invention pertain to methods of producing such recombinant CDKL5 proteins and gene therapy compositions, as well as pharmaceutical compositions, methods of treatment, and uses of such recombinant proteins and gene therapy compositions.

[0008] One aspect of the present invention relates to a composition comprising a gene therapy delivery system and a CDKL5 polynucleotide encoding a CDKL5 polypeptide. In various embodiments, the CDKL5 polypeptide has at least 98% sequence identity to SEQ ID NO: 1, SEQ ID NO: 2, SEQ ID NO: 3, SEQ ID NO: 4, SEQ ID NO: 5, SEQ ID NO: 6, SEQ ID NO: 7, SEQ ID NO: 8, SEQ ID NO: 9, SEQ ID NO: 10, SEQ ID NO: 11, SEQ ID NO: 12, SEQ ID NO: 13, SEQ ID NO: 14, SEQ ID NO: 15, SEQ ID NO: 16, SEQ ID NO: 17, SEQ ID NO: 18, SEQ ID NO: 19, SEQ ID NO: 20, SEQ ID NO: 21, SEQ ID NO: 22, SEQ ID NO: 23, SEQ ID NO: 24, SEQ ID NO: 25 or SEQ ID NO: 26.

[0009] In one or more embodiments, the CDKL5 polypeptide has at least 98% sequence identity to SEQ ID NO: 1 or SEQ ID NO: 26. In one or more embodiments, the CDKL5 polynucleotide has at least 90% sequence identity to SEQ ID NO: 123.

[0010] In one or more embodiments, the CDKL5 polypeptide has at least 98% sequence identity to SEQ ID NO: 2, SEQ ID NO: 3, SEQ ID NO: 4, SEQ ID NO: 5, SEQ ID NO: 6, SEQ ID NO: 7, SEQ ID NO: 8, SEQ ID NO: 9, SEQ ID NO: 10, SEQ ID NO: 11, or SEQ ID NO: 12.

[0011] In one or more embodiments, the CDKL5 polypeptide has at least 98% sequence identity to SEQ ID NO: 13, SEQ ID NO: 14, SEQ ID NO: 15, SEQ ID NO: 16, SEQ ID NO: 17, SEQ ID NO: 18, SEQ ID NO: 19, SEQ ID NO: 20, SEQ ID NO: 21, SEQ ID NO: 22, SEQ ID NO: 23, SEQ ID NO: 24 or SEQ ID NO: 25. In one or more embodiments, the CDKL5 polynucleotide has at least 90% sequence identity to SEQ ID NO: 125, SEQ ID NO: 127, SEQ ID NO: 129, SEQ ID NO: 131, SEQ ID NO: 133, SEQ ID NO: 135, SEQ ID NO: 137, SEQ ID NO: 139, SEQ ID NO: 141, SEQ ID NO: 143, SEQ ID NO: 145, SEQ ID NO: 147 or 1 SEQ ID NO: 149.

[0012] In one or more embodiments, the gene therapy delivery system comprises one or more of a viral vector, a liposome, a lipid-nucleic acid nanoparticle, an exosome and a gene editing system. In one or more embodiments, the gene editing system comprises one or more of Clustered Regularly Interspaced Short Palindromic Repeat (CRISPR) associated protein 9 (CRISPR-Cas-9), Transcription activator-like effector nuclease (TALEN) or ZNF (Zinc finger protein).

[0013] In one or more embodiments, the gene therapy delivery system comprises a viral vector. In one or more embodiments, the viral vector comprises one or more of an adenoviral vector, an adeno-associated viral vector, a lentiviral vector, a retroviral vector, a poxviral vector or a herpes simplex viral vector. In one or more embodiments, the viral vector comprises a viral polynucleotide operably linked to the CDKL5 polynucleotide. In one or more embodiments, the viral vector comprises at least one inverted terminal repeat (ITR).

[0014] In one or more embodiments, the composition further comprises one or more of an SV40 intron, a polyadenylation signal or a stabilizing element.

[0015] In one or more embodiments, the composition further comprises a promoter. In one or more embodiments, the promoter has at least 90% sequence identity to SEQ ID NO: 29 or SEQ ID NO: 30.

[0016] In one or more embodiments, the composition further comprises a polynucleotide encoding a cell-penetrating polypeptide. In one or more embodiments, the cell-penetrating polypeptide has at least 90% sequence identity to SEQ ID NO: 32, SEQ ID NO: 34, SEQ ID NO: 35, SEQ ID NO: 36, SEQ ID NO: 37 or SEQ ID NO: 167. In one or more embodiments, the polynucleotide encoding the cell-penetrating peptide has at least 90% sequence identity to SEQ ID NO: 150, SEQ ID NO: 151, SEQ ID NO: 152, SEQ ID NO: 153, SEQ ID NO: 154, SEQ ID NO: 170, SEQ ID NO: 171, SEQ ID NO: 172 or SEQ ID NO: 173.

[0017] In one or more embodiments, the composition further comprises a polynucleotide encoding a leader signal polypeptide. In one or more embodiments, the leader signal polypeptide has at least 90% sequence identity to SEQ ID NO: 38, SEQ ID NO: 39, SEQ ID NO: 40, SEQ ID NO: 41, SEQ ID NO: 42, SEQ ID NO: 156, SEQ ID NO: 157, SEQ ID NO: 158, SEQ ID NO: 159, SEQ ID NO: 160, SEQ ID NO: 161, SEQ ID NO: 162, SEQ ID NO: 163, SEQ ID NO: 164, SEQ ID NO: 165, SEQ ID NO: 166 or SEQ ID NO: 168. In one or more embodiments, the polynucleotide encoding the leader signal polypeptide has at least 90% sequence identity to SEQ ID NO: 155. In one or more embodiments, the polynucleotide encoding the leader signal polypeptide has at least 90% sequence identity to SEQ ID NO: 169.

[0018] Another aspect of the present invention relates to a pharmaceutical formulation comprising a composition as described herein and a pharmaceutically acceptable carrier.

[0019] Another aspect of the present invention relates to a method of treating a CDKL5-mediated neurological disorder, the method comprising administering a composition or formulation as described herein to a patient in need thereof. In one or more embodiments, the composition or the formulation is administered intrathecally, intravenously, intracistnerally, intracerebroventrically or intraparenchymally. In one or more embodiments, the CDKL5-mediated neurological disorder is one or more of a CDKL5 deficiency or an atypical Rett syndrome caused by a CDKL5 mutation or deficiency.

[0020] Another aspect of the present invention relates to a method of treating a CDKL5-mediated neurological disorder, the method comprising administering a composition or formulation as described herein to an ex vivo cell and administering the ex vivo cell to a patient in need thereof. In one or more embodiments, ex vivo cell is administered intrathecally, intravenously, intracistnerally, intracerebroventrically or intraparenchymally. In one or more embodiments, the CDKL5-mediated neurological disorder is one or more of a CDKL5 deficiency or an atypical Rett syndrome caused by a CDKL5 mutation or deficiency.

[0021] Another aspect of the present invention relates to a novel CDKL5 polypeptide. In various embodiments, the CDKL5 polypeptide comprises a sequence having at least 99% sequence identity to SEQ ID NO: 13, SEQ ID NO: 14, SEQ ID NO: 15, SEQ ID NO: 16, SEQ ID NO: 17, SEQ ID NO: 18, SEQ ID NO: 19, SEQ ID NO: 20, SEQ ID NO: 21, SEQ ID NO: 22, SEQ ID NO: 23, SEQ ID NO: 24 or SEQ ID NO: 25. In one or more embodiments, the CDKL5 polypeptide comprises the sequence of SEQ ID NO: 13, SEQ ID NO: 14, SEQ ID NO: 15, SEQ ID NO: 16, SEQ ID NO: 17, SEQ ID NO: 18, SEQ ID NO: 19, SEQ ID NO: 20, SEQ ID NO: 21, SEQ ID NO: 22, SEQ ID NO: 23, SEQ ID NO: 24 or SEQ ID NO: 25. In one or more embodiments, the CDKL5 polypeptide comprises the sequence of SEQ ID NO: 13. In one or more embodiments, the CDKL5 polypeptide comprises the sequence of SEQ ID NO: 14. In one or more embodiments, the CDKL5 polypeptide comprises the sequence of SEQ ID NO: 15. In one or more embodiments, the CDKL5 polypeptide comprises the sequence of SEQ ID NO: 16. In one or more embodiments, the CDKL5 polypeptide comprises the sequence of SEQ ID NO: 17. In one or more embodiments, the CDKL5 polypeptide comprises the sequence of SEQ ID NO: 18. In one or more embodiments, the CDKL5 polypeptide comprises the sequence of SEQ ID NO: 19. In one or more embodiments, the CDKL5 polypeptide comprises the sequence of SEQ ID NO: 20. In one or more embodiments, the CDKL5 polypeptide comprises the sequence of SEQ ID NO: 21. In one or more embodiments, the CDKL5 polypeptide comprises the sequence of SEQ ID NO: 22. In one or more embodiments, the CDKL5 polypeptide comprises the sequence of SEQ ID NO: 23. In one or more embodiments, the CDKL5 polypeptide comprises the sequence of SEQ ID NO: 24. In one or more embodiments, the CDKL5 polypeptide comprises the sequence of SEQ ID NO: 25.

[0022] Another aspect of the present invention relates to a fusion protein comprising a CDKL5 polypeptide as described herein and a leader signal polypeptide operatively coupled to the CDKL5 polypeptide. In one or more embodiments, the leader signal polypeptide has at least 90% sequence identity to SEQ ID NO: 38, SEQ ID NO: 39, SEQ ID NO: 40, SEQ ID NO: 41, SEQ ID NO: 42 or SEQ ID NO: 168. In one or more embodiments, the leader signal polypeptide comprises the sequence of SEQ ID NO: 38, SEQ ID NO: 39, SEQ ID NO: 40, SEQ ID NO: 41, SEQ ID NO: 42 or SEQ ID NO: 168.

[0023] Another aspect of the present invention relates to a fusion protein comprising a CDKL5 polypeptide as described herein and a cell-penetrating polypeptide operatively coupled to the CDKL5 polypeptide. In one or more embodiments, the cell-penetrating polypeptide has at least 90% sequence identity to SEQ ID NO: 31, SEQ ID NO: 32, SEQ ID NO: 33, SEQ ID NO: 34, SEQ ID NO: 35, SEQ ID NO: 36, SEQ ID NO: 37 or SEQ ID NO: 167. In one or more embodiments, the cell-penetrating polypeptide comprises the sequence of SEQ ID NO: 31, SEQ ID NO: 32, SEQ ID NO: 33, SEQ ID NO: 34, SEQ ID NO: 35, SEQ ID NO: 36, SEQ ID NO: 37 or SEQ ID NO: 167. In one or more embodiments, the fusion protein further comprises a leader signal polypeptide. In one or more embodiments, the leader signal polypeptide has at least 90% sequence identity to SEQ ID NO: 38, SEQ ID NO: 39, SEQ ID NO: 40, SEQ ID NO: 41, SEQ ID NO: 42 or SEQ ID NO: 168. In one or more embodiments, the leader signal polypeptide comprises the sequence of SEQ ID NO: 38, SEQ ID NO: 39, SEQ ID NO: 40, SEQ ID NO: 41, SEQ ID NO: 42 or SEQ ID NO: 168.

[0024] In one or more embodiments, the fusion protein further comprises one or more affinity-tags, one or more protease cleavage sites, or combinations thereof. In some embodiments, the affinity-tag comprises one or more of MYC, HA, V5, NE, StrepII, Twin-Strep-tag®, glutathione S-transferase (GST), maltose-binding protein (MBP), calmodulin-binding peptide (CBP), FLAG®, 3×FLAG®, polyhistidine (His), HPC4, or combinations thereof. In some embodiments, the protease cleavage site is sensitive to one or more of thrombin, furin, factor Xa, metalloproteases, enterokinases, cathepsin, HRV3C, TEV, or combinations thereof.

[0025] Another aspect of the present invention relates to a pharmaceutical formulation comprising a CDKL5 polypeptide or fusion protein as described herein and a pharmaceutically acceptable carrier.

[0026] Another aspect of the present invention relates to a method of treating a CDKL5-mediated neurological disorder, the method comprising administering a CDKL5 polypeptide or fusion protein or formulation as described herein to a patient in need thereof. In one or more embodiments, the polypeptide, fusion protein or formulation is administered intrathecally, intravenously, intracisternally, intracerebroventrically or intraparenchymally. In one or more embodiments, the CDKL5-mediated neurological disorder is one or more of a CDKL5 deficiency or an atypical Rett syndrome caused by a CDKL5 mutation or deficiency.

[0027] Another aspect of the present invention relates to a method of producing a CDKL5 polypeptide or fusion protein as described herein. In various embodiments, the method comprises expressing the CDKL5 polypeptide or the fusion protein and purifying the CDKL5 polypeptide or the fusion protein. In one or more embodiments, the CDKL5 polypeptide or the fusion protein is expressed in Chinese hamster ovary (CHO) cells, HeLa cells, human embryonic kidney (HEK) cells or Escherichia coli cells.

[0028] Another aspect of the present invention relates to a method of producing a protein comprising a CDKL5 polypeptide, the method comprising expressing the protein in insect cells and purifying the protein from the insect cells. In one or more embodiments, the insect cells are Sf9 cells or BTI-Tn-5B1-4 cells.

[0029] In one or more embodiments, the protein comprises a fusion protein comprising the CDKL5 polypeptide and a cell-penetrating polypeptide operatively coupled to the CDKL5 polypeptide. In one or more embodiments, the cell-penetrating polypeptide is operatively coupled to the N-terminus of the CDKL5 polypeptide. In one or more embodiments, the cell-penetrating polypeptide is operatively coupled to the C-terminus of the CDKL5 polypeptide. In one or more embodiments, the fusion protein further comprises a leader signal polypeptide.

[0030] In one or more embodiments, the fusion protein further comprises one or more affinity-tags, one or more protease cleavage sites, or combinations thereof. In some embodiments, the affinity-tag comprises MYC, HA, V5, NE, StrepII, Twin-Strep-tag®, glutathione S-transferase (GST), maltose-binding protein (MBP), calmodulin-binding peptide (CBP), FLAG®, 3×FLAG®, polyhistidine (His), HPC4, or combinations thereof. In some embodiments, the protease cleavage site is sensitive to one or more of thrombin, furin, factor Xa, metalloproteases, enterokinases, cathepsin, HRV3C, TEV, or combinations thereof.

[0031] In one or more embodiments, the CDKL5 polypeptide has at least 98% sequence identity to SEQ ID NO: 1, SEQ ID NO: 2, SEQ ID NO: 3, SEQ ID NO: 4, SEQ ID NO: 5, SEQ ID NO: 6, SEQ ID NO: 7, SEQ ID NO: 8, SEQ ID NO: 9, SEQ ID NO: 10, SEQ ID NO: 11, SEQ ID NO: 12, SEQ ID NO: 13, SEQ ID NO: 14, SEQ ID NO: 15, SEQ ID NO: 16, SEQ ID NO: 17, SEQ ID NO: 18, SEQ ID NO: 19, SEQ ID NO: 20, SEQ ID NO: 21, SEQ ID NO: 22, SEQ ID NO: 23, SEQ ID NO: 24, SEQ ID NO: 25 or SEQ ID NO: 26. In one or more embodiments, the CDKL5 polypeptide has at least 98% sequence identity to SEQ ID NO: 1 or SEQ ID NO: 26. In one or more embodiments, the CDKL5 polypeptide has at least 98% sequence identity to SEQ ID NO: 2, SEQ ID NO: 3, SEQ ID NO: 4, SEQ ID NO: 5, SEQ ID NO: 6, SEQ ID NO: 7, SEQ ID NO: 8, SEQ ID NO: 9, SEQ ID NO: 10, SEQ ID NO: 11, or SEQ ID NO: 12.

### BRIEF DESCRIPTION OF THE DRAWINGS

[0032] The patent or application file contains at least one drawing executed in color. Copies of this patent or patent application publication with color drawing(s) will be provided by the Office upon request and payment of the necessary fee.

[0033] FIG. 1A shows a polypeptide map of CDKL5₁₀₇. The map identifies important features of the polypeptide, including the ATP binding site, kinase domain and kinase active site, two nuclear localization signals, and a nuclear export signal.

[0034] FIGS. 1B and 1C show a graphic depicting the synthesized CDKL5 construct variants (1B) and a legend describes the length of the polypeptides, along with the relevant amino acid deletion information to describe how the constructs were synthesized (1C).

[0035] FIGS. 2A-2BK show exemplary plasmids for expressing various CDKL5 polypeptides and fusion proteins in cells such as CHO cells, HEK cells, Sf9 or E. Coli cells.

[0036] FIGS. 3A and 3B show Western blots of various CDKL5 fusion proteins expressed in E. coli cells. FIGS. 4A and 4B show Western blots of various CDKL5 fusion proteins expressed in CHO and HEK cells, respectively.

[0037] FIG. 4A shows expression of CDKL5 variants in CHO cells. FIG. 4B shows expression of CDKL5 variants in HEK293F cells.

[0038] FIG. 5 shows a Western blot demonstrating methotrexate amplification of various CDKL5 fusion proteins in CHO Cells.

[0039] FIGS. 6A and 6B show Western blots demonstrating expression and secretion of various CDKL5 fusion proteins in culture medium and cell lysates, respectively.

[0040] FIG. 7 shows a Western blot of a CDKL5 fusion protein that was co-expressed in the cytoplasm of HEK293F with several potential substrates.

[0041] FIG. 8 shows a Western blot of various CDKL5 fusion proteins expressed in a HeLa-based in vitro transcription/translation system.

[0042] FIGS. 9A and 9B show Western blots demonstrating glycosylation of various CDKL5 fusion proteins expressed in CHO and HEK cells, respectively.

[0043] FIG. 10 shows a quantitative analysis of relative expression and yield of CDKL5 protein in bacterial, mammalian and insect cell expression system.

[0044] FIGS. 11A and 11B show Sypro Ruby Red stained gels of various CDKL5 fusion proteins expressed in Sf9 insect cells.

[0045] FIG. 12A shows a Sypro Ruby Red stained gel of a CDKL5 fusion protein in cell lysate and the purified fusion protein.

[0046] FIG. 12B shows a Sypro Ruby Red stained gel demonstrating HRV3C protease cleavage of the CDKL5 fusion protein of FIG. 11A.

[0047] FIG. 13 shows Coomassie stained gels demonstrating solubility of CDKL5 fusion proteins in various salt and excipient systems.

[0048] FIG. 14A shows a schematic of TwinStrep-HRV3C-TATκ28-CDKL5-HRV3C-FLAG-His-HPC4 protein.

[0049] FIG. 14B shows purification and cleavage of TwinStrep-HRV3C-TATκ28-CDKL5-HRV3C-FLAG-His-HPC4 protein.

[0050] FIG. 15 shows a Western blot analysis of TwinStrep-HRV3C-TATκ28-CDKL5-HRV3C-FLAG-His-HPC4 protein purification and cleavage. FIG. 15A shows a Western-blot analysis using anti-strepII antibody. FIG. 15B shows a Western blot analysis using anti-HPC4 antibody.

[0051] FIG. 16 shows IMAC purification of TwinStrep-HRV3C-TATκ28-CDKL5-HRV3C-FLAG-His-HPC4 protein.

[0052] FIG. 17 shows a schematic of TwinStrep-HRV3C-TATκ28-CDKL5-HRV3C-FLAG-His-TwinStrep protein.

[0053] FIG. 18A shows purification and cleavage of TwinStrep-HRV3C-TATκ28-CDKL5-HRV3C-FLAG-His-TwinStrep protein. FIG. 18B shows a Western blot analysis of TwinStrep-HRV3C-TATκ28-CDKL5-HRV3C-FLAG-His-TwinStrep protein purification and cleavage.

[0054] FIG. 19 shows cation exchange chromatographic purification of TwinStrep-HRV3C-TATκ28-CDKL5-HRV3C-FLAG-His-TwinStrep protein.

[0055] FIG. 20 shows uptake of TATκ28-CDKL5 protein in rat DIV14 embryonic primary cortical neurons.

[0056] FIG. 21 shows uptake of TATκ28-CDKL5 protein in rat DIV7 embryonic primary cortical neurons.

[0057] FIG. 22 shows uptake of TATκ28-CDKL5 protein in rat DIV14 embryonic primary cortical neurons.

[0058] FIG. 23 shows time dependent uptake of TATκ28-CDKL5 protein in DIV14 embryonic primary cortical neurons.

[0059] FIG. 24 shows statistical analysis of TATκ28-CDKL5 protein uptake in DIV14 embryonic primary cortical neurons over time.

[0060] FIG. 25A shows co-localization of TATκ28-CDKL5 protein with PSD95.

[0061] FIG. 25B shows co-localization of TATκ28-CDKL5 protein with Synapsin 1.

[0062] FIGS. 26A-26E show rat neurons treated by lentiviral delivery of various CDKL5 fusion proteins.

[0063] FIG. 27A-271 shows BIP-TATκ28-CDKL5 induced cross-correction in striatum.

[0064] FIG. 28A-271 shows BIP-TATκ28-CDKL5 induced cross-correction in thalamus.

[0065] FIG. 29A-291 shows BIP-TATκ28-CDKL5 induced cross-correction in hippocampal formation.

[0066] FIG. 30A-30D shows raw-image and overlap image of DAPI stained cells, neurons, neurons having BIP-TATκ28-CDKL5 mRNA and BIP-TATκ28-CDKL5 protein, neurons having BIP-TATκ28-CDKL5 mRNA only, cross-corrected neurons and cross-corrected non-neurons.

[0067] FIG. 31A-31B shows quantifying cross-corrected cells using visiopharm.

[0068] FIG. 32A shows a statistical analysis of cross-corrected neurons in sagittal section. FIG. 32B shows a statistical analysis of cross-corrected neurons in particular brain regions including isocortex, striatum, thalamus and hippocampal formation.

[0069] FIG. 33 shows an exemplary plasmid for transfecting fusion proteins as described herein.

### DETAILED DESCRIPTION

[0070] Before describing several exemplary embodiments of the invention, it is to be understood that the invention is not limited to the details of construction or process steps set forth in the following description. The invention is capable of other embodiments and of being practiced or being carried out in various ways.

[0071] It has surprisingly been discovered that proteins comprising the wild-type CDKL5 sequence have significant N-linked glycosylation when expressed and secreted in various host cell systems. Such N-linked glycosylation may have a negative impact on enzyme function due to changes in folding and/or interactions with binding partners. Accordingly, various aspects of the present invention relate to recombinant proteins comprising CDKL5 polypeptides that have one or more mutations to remove N-linked glycosylation sites.

[0072] Moreover, without wishing to be bound by any particular theory, it is believed that shorter CDKL5 variants that retain functional activity can provide benefits over the full-length, wild-type CDKL5 polypeptide, particularly when incorporated into a fusion protein comprising the CDKL5 polypeptide. In one or more embodiments, such benefits can include improved secretion from host cells during protein production, improved solubility, enhanced ability to cross the blood-brain barrier (BBB), and/or enhanced ability to penetrate target cells.

[0073] Other aspects of the present invention relate to novel cell systems for expressing and secreting recombinant proteins comprising CDKL5 polypeptides (e.g., wild-type CDKL5 polypeptides, CDKL5 variants with one or more N-linked glycosylation sites removed and/or shorter CDKL5 variants).

[0074] Other aspects of the present invention relate to gene therapy compositions and methods that utilize a CDKL5 polynucleotide encoding a CDKL5 polypeptide as described herein and a gene therapy delivery system.

### Definitions

[0075] As used herein, the term “CDKL5-mediated neurological disorder” refers to any disease or disorder that can be treated by expression or overexpression of the CDKL5 protein.

[0076] As used herein, the term “CDKL5 deficiency” refers to any deficiency in the biological function of the protein. The deficiency can result from any DNA mutation in the DNA coding for the protein or a DNA related regulatory region or any change in the function of the protein due to any changes in epigenetic DNA modification, including but not limited to DNA methylation or histone modification, any change in the secondary, tertiary, or quaternary structure of the CDKL5 protein, or any change in the ability of the CDKL5 protein to carry out its biological function as compared to a wild-type or normal subject. The deficiency can also include a lack of CDKL5 protein, such as a null mutation or underexpression of a fully functioning protein.

[0077] As used herein, the term “atypical Rett syndrome caused by a CDKL5 mutation or deficiency” refers to an atypical form of Rett syndrome with similar clinical signs to Rett syndrome but is caused by a CDKL5 mutation or deficiency.

[0078] Symptoms or markers of a CDKL5 deficiency, Rett syndrome, or an atypical Rett syndrome include but are not limited to seizures, cognitive disability, hypotonia, as well as autonomic, sleep, and gastrointestinal disturbances.

[0079] As used herein, the term “gene therapy delivery system” refers to any system that can be used to deliver an exogenous gene of interest to a target cell so that the gene of interest will be expressed or overexpressed in the target cell. In one or more embodiments, the target cell is an in vivo patient cell. In one or more embodiments, the target cell is an ex vivo cell and the cell is then administered to the patient.

[0080] As used herein, the term “carrier” is intended to refer to a diluent, adjuvant, excipient, or vehicle with which a compound is administered. Suitable pharmaceutical carriers are known in the art and, in at least one embodiment, are described in “Remington's Pharmaceutical Sciences” by E. W. Martin, 18th Edition, or other editions.

[0081] As used herein, the term “enzyme replacement therapy” or “ERT” is intended to refer to the introduction of an exogenous, purified enzyme into an individual having a deficiency in such enzyme. The administered protein can be obtained from natural sources or by recombinant expression. The term also refers to the introduction of a purified enzyme in an individual otherwise requiring or benefiting from administration of a purified enzyme. In at least one embodiment, such an individual suffers from enzyme insufficiency. The introduced enzyme may be a purified, recombinant enzyme produced in vitro, or a protein purified from isolated tissue or fluid, such as, for example, placenta or animal milk, or from plants.

[0082] As used herein, the terms “subject” or “patient” are intended to refer to a human or non-human animal. In at least one embodiment, the subject is a mammal. In at least one embodiment, the subject is a human.

[0083] As used herein, the “therapeutically effective dose” and “effective amount” are intended to refer to an amount of gene therapy composition (e.g. comprising CDKL5 polynucleotides) or recombinant protein (e.g. CDKL5 variants or fusion proteins) which is sufficient to result in a therapeutic response in a subject. A therapeutic response may be any response that a user (for example, a clinician) will recognize as an effective response to the therapy, including any surrogate clinical markers or symptoms described herein and known in the art. Thus, in at least one embodiment, a therapeutic response can be an amelioration or inhibition of one or more symptoms or markers of a CDKL5 deficiency, Rett syndrome, or an atypical Rett syndrome such as those known in the art.

### Function of CDKL5 Proteins

[0084] The human CDKL5 gene is composed of 24 exons, of which the first three (exons 1, 1a and 1b) are untranslated.

[0085] The originally discovered human CDKL5 variant was 1030 amino acids with a molecular mass of 115 kDa (CDKL5₁₁₅). Another prominent variant, CDKL5₁₀₇, contains an altered C-terminal region because alternative splicing combines different exons than in the CDKL5₁₁₅ variant. CDKL5₁₀₇ (107 kDa) is shorter because it harbors an alternate version of exon 19 and does not contain exons 20-21 that are present in the CDKL5₁₁₅ variant. The hCDKL5₁₀₇ mRNA has been found to be 37-fold more abundant in human brain than the hCDKL5₁₁₅ transcript, and murine CDKL5₁₀₇ has been found to be 160-fold more abundant than the murine CDKL5₁₀₅ variant in murine brain. Both the human and murine CDKL5₁₀₇ isoforms have demonstrated a longer half-life and resistance to degradation as compared to the human CDKL5₁₁₅ variant.

[0086] CDKL5 knockout mouse models have been generated using the Lox-Cre recombination system and these mice present symptoms of autistic-like deficits in social interactions, impairment of motor control, and loss of fear memory (Wang et al., Proc Natl Acad Sci U.S.A, 109(52), 21516-21521). For example, knockout CDKL5 mice have symptoms of reduced motor coordination and demonstrate impaired memory and fear responses when repeatedly exposed to stimuli. These changes have led scientists to hypothesize that loss of CDKL5 kinase activity leads to impaired neuronal network development. Previous data have suggested that CDKL5 phosphorylates methyl-CpG binding protein 2 (MeCP2), and independent loss-of-function mutations in MeCP2 lead to the Rett syndrome phenotype. Other substrates of CDKL5 include Netrin G1 ligand (NGL-1), Shootin1 (SHTN1), Mindbomb 1 (MIB1), DNA (cytosine-5)-methyltransferase 1 (DNMT1), Amphiphysin 1 (AMPH1), end-binding protein EB2, microtubule associated protein 1S (MAP1S) and histone deacetylase 4 (HDAC4). Although the exact role of CDKL5 has yet to be identified, these data suggest that CDKL5 plays a role in phosphorylation of downstream targets that are critical for correct neuronal development, including MeCP2. In humans, mutations in CDKL5 are associated with a phenotype that overlaps with Rett syndrome, and additionally presents with early-onset seizures. While CDKL5 KO mice did not exhibit any early-onset seizure symptoms, they did exhibit motor defects, decreased sociability, and impaired learning and memory (Chen et al. CDKL5, a protein associated with Rett Syndrome, regulates neuronal morphogenesis via Rac1 signaling, J Neurosci 30: 12777-12786).

[0087] Two CDKL5 isoforms are found in rat, one labeled CDKL5a and the other CDKL5b. (Chen et al.). In general, there is a high level of sequence conservation in CDKL5 genes across human, rat, and mouse species except for the last 100-150 amino acids near the C-terminus. Western blot data show that both variants are present during rat development yet adults appear to predominately express a single variant. Furthermore, CDKL5 is present in identifiable quantities in brain, liver, and lung.

[0088] CDKL5 functions in the nucleus but it is also found in the dendrites of cultured neurons, suggesting a possible alternate cytoplasmic role. Down regulation of CDKL5 expression by RNAi (RNA Interference) in cultured cortical neurons inhibited neurite growth and dendritic arborization (branching), where over expression of CDKL5 had opposite effects (Chen et al.). In order to characterize both the nuclear and cytoplasmic effect of CDKL5, a variant of CDKL5a with a nuclear export sequence (NES) was expressed in the cultured cortical neuron RNAi model. This NES-CDKL5a variant was resistant to the RNAi used to silence the wild-type gene expression, and therefore was used to model CDKL5a when expressed solely in the cytoplasm. After using the GFP tag to confirm that this CDKL5 variant was exclusively present in the cytoplasm, an increase in both the length of neurites and number of neurite branches was seen. The ability of NES-GFP-CDKL5a to partially rescue the disease phenotype observed when RNAi was used to knockdown the endogenous CDKL5 expression suggests that the expression of CDKL5 in cytoplasm in an important factor in the development and growth of neurites.

[0089] Human mutations in CDKL5 are associated with a phenotype similar to Rett syndrome, and individuals with CDKL5 mutations also present with early-onset seizures. This onset of seizures differs from the classical Rett syndrome phenotype in which there is an early normal period of development before the onset of Rett symptoms. Patients with classical Rett syndrome (RTT) appear to develop normally until 6-18 months of age, and then they begin to present neurological symptoms including loss of speech and movement. Autopsies of RTT brains show smaller and more densely packed neurons with shorter dendrites in the motor and frontal cortex, suggesting that neuronal development is impaired. The majority of Classical RTT cases are due to mutations in the MECP2 gene, which is an X-linked gene encoding a nuclear protein that selectively binds to CpG dinucleotides in the mammalian genome and regulates transcription through the recruitment of complexes. Although poorly understood, it is generally thought that the dysregulation of gene expression caused by mutations in MECP2 is the underlying cause of Rett Syndrome. Approximately 20% of Classic Rett syndrome cases and 60-80% of other Rett syndrome variants carry no mutations in MECP2, suggesting an alternate genetic cause for pathogenesis. Recently, some CDKL5 mutations have been identified in patients with certain variants of RTT and other severe encephalopathies, and CDKL5 has been shown to interact with MeCP2 both in vivo and in vitro. Beyond MeCP2, CDKL5 has been shown to interact with and phosphorylate a number of downstream targets, including NGL-1. When phosphorylated, NGL-1 interacts with PSD95 and is critical for the correct genesis and development of dendritic spines and synapse formation (Ricciardi S, et al. “CDKL5 ensures excitatory synapse stability by reinforcing NGL-1-PSD95 interaction in the postsynaptic compartment and is impaired in patient iPSC-derived neurons.” Nat Cell Biol 14(9):911-923).

[0090] CDKL5 has also been shown to phosphorylate the protein DNA methyltransferase 1 (DNMT1) (Kameshita I, et al. “Cyclin-dependent kinase-like 5 binds and phosphorylates DNA methyltransferase 1.” Biochem Biophys Res Commun 377:1162-1167). This phosphorylation leads to activation of DNMT1, which is a maintenance-type methylation protein that preferentially methylates hemimethylated DNA. This process is useful for maintenance of DNA methylation patterns during DNA replication, so that newly synthesized daughter DNA strands are able to maintain the methylation pattern of the parent strand it replaced. As methylation of DNA is generally thought to be an epigenetic mechanism to silence gene expression, this maintenance function of DNMT1 is crucial in preserving gene expression patterns across cell generations.

[0091] Current models suggest that the CDKL5 kinase domain phosphorylates GSK-3β, and that phosphorylation of GSK-3β leads to its inactivation. Individuals who are deficient in CDKL5 activity therefore seem to exhibit increased GSK-3β activity. Previous studies have shown that GSK-3β modulates hippocampal neurogenesis, and that an increased activity of GSK-3β severely impairs dendritic morphology of newborn hippocampal neurons. Furthermore, GSK-3β seems to act as a negative regulator of key developmental events such as neuron survival and maturation. A study conducted using CDKL5 KO mice demonstrated that treatment with a GSK-3β inhibitor could almost fully rescue hippocampal development and behavioral deficits in mice deficient in CDKL5 activity (Fuchs et al. “Inhibition of GSK3β Rescues Hippocampal Development and Learning in a Mouse Model of CDKL5 Disorder.” Neurobiology of Disease 82: 298-310). This developmental rescue also seemed to persist beyond treatment.

### CDKL5₁₀₇ Polypeptide Constructs

[0092] FIG. 1A displays a polypeptide map of CDKL5₁₀₇. The amino acid sequence of the wild-type full-length human CDKL5₁₀₇ isoform is provided in SEQ ID NO: 1. The CDKL5₁₀₇ protein consists of 960 amino acids, and the kinase domain is contained in the first ˜300 amino acids. Residue 42 of 960 is a key lysine residue located within the kinase domain that participates in ATP binding during a phosphorylation reaction, and mutation of this residue generally leads to loss of kinase activity (“Kinase dead”). Additionally, two nuclear localization signals are present spanning residues 312-315 (NLS1) and 784-789 (NLS2), and a nuclear export signal (NES) is present spanning residues 836-845. Amino acids at the C-terminus spanning from residue 905 to 960 are unique to CDKL5₁₀₇ and are not present in CDKL5₁₁₅. Amino acid residues 1-904 are identical between CDKL5₁₁₅ and CDKL5₁₀₇. The amino acid sequence of the wild-type full-length human CDKL5₁₁₅ isoform is provided in SEQ ID NO: 26.

[0093] Various embodiments of the present invention provide novel CDKL5 variants. FIGS. 1B and 1C show the polypeptides of the full-length human CDKL5₁₀₇ isoform (Construct 1) and novel CDKL5 constructs (designated as Constructs 2-12). These CDKL5 constructs generally fall into two categories: those missing some number of amino acids at the C-terminus (Constructs 2-7) and those missing some number of amino acids in the middle of the polypeptide chain (Constructs 8-12). Moreover, in those constructs wherein CDKL5 is fused C-terminally to additional N-terminal amino acid sequences, the initial methionine of CDKL5 is removed. In these constructs, the CDKL5 polypeptide begins with the second amino acid, lysine. Construct 1 contains all 960 amino acids of the full-length human CDKL5₁₀₇ isoform. Construct 2, which contains the first 851 amino acids of the entire 960 amino acid chain, represents a shortened CDKL5 polypeptide in which the tail sequence that differs between CDKL5₁₀₇ and CDKL5₁₁₅ is removed but the kinase domain, nuclear localization signals (NLS1 and NLS2), and nuclear export signal (NES) remain intact. Construct 3 is shortened further, in which the nuclear localization signal (NLS2) and the nuclear export signal (NES) are additionally removed. Constructs 4-7 are shortened even further, as shown in FIGS. 1B and 1C. Constructs 2-7 all contain the active kinase domain, while Constructs 3-7 do not contain the NLS2 or NES sequences. Construct 7 is further shortened up to the NLS1 sequence. The remaining constructs (Constructs 8-12) all have deletions in the middle portion of the polypeptide chain while retaining the C-terminal amino acids unique to CDKL5₁₀₇. Of these constructs, Construct 12 is missing the NES and NLS2 sequences. The amino acid sequences of Constructs 1-12 are provided in SEQ ID NOS: 1-12, respectively.

[0094] In one or more embodiments, the CDKL5 polypeptide has at least 98%, at least 98.5%, at least 99% or at least 99.5% sequence identity to SEQ ID NO: 2, SEQ ID NO: 3, SEQ ID NO: 4, SEQ ID NO: 5, SEQ ID NO: 6, SEQ ID NO: 7, SEQ ID NO: 8, SEQ ID NO: 9, SEQ ID NO: 10, SEQ ID NO: 11 or SEQ ID NO: 12. The CDKL5 polypeptide may contain deletions, substitutions and/or insertions relative to SEQ ID NO: 2, SEQ ID NO: 3, SEQ ID NO: 4, SEQ ID NO: 5, SEQ ID NO: 6, SEQ ID NO: 7, SEQ ID NO: 8, SEQ ID NO: 9, SEQ ID NO: 10, SEQ ID NO: 11 or SEQ ID NO: 12, such as having 1, 2, 3, 4, 5, 6, 7, 8, 9, 10, 11, 12, 13, 14, 15 or more deletions, substitutions and/or insertions to the amino acid sequence described by SEQ ID NO: 2, SEQ ID NO: 3, SEQ ID NO: 4, SEQ ID NO: 5, SEQ ID NO: 6, SEQ ID NO: 7, SEQ ID NO: 8, SEQ ID NO: 9, SEQ ID NO: 10, SEQ ID NO: 11 or SEQ ID NO: 12.

[0095] In one or more embodiments, the CDKL5 polypeptide has at least 98%, at least 98.5%, at least 99% or at least 99.5% sequence identity to SEQ ID NO: 1 or SEQ ID NO: 26. The CDKL5 polypeptide may contain deletions, substitutions and/or insertions relative to SEQ ID NO: 1 or SEQ ID NO: 26, such as having 1, 2, 3, 4, 5, 6, 7, 8, 9, 10, 11, 12, 13, 14, 15 or more deletions, substitutions and/or insertions to the amino acid sequence described by SEQ ID NO: 1 or SEQ ID NO: 26.

[0096] In one or more embodiments, the CDKL5 polypeptide comprises one or more affinity-tags. In one or more embodiments, the affinity-tag is located on one or more of the N-terminus or the C-terminus of the CDKL5 polypeptide. Examples of tags that can be added to the fusion proteins include, but are not limited to, epitope tags (e.g. MYC, HA, V5, NE, StrepII, Twin-Strep-tag®, HPC4), glutathione S-transferase (GST), maltose-binding protein (MBP), calmodulin-binding peptide (CBP), FLAG®, 3×FLAG®, polyhistidine (His), and combinations thereof.

[0097] In one or more embodiments, the CDKL5 polypeptide comprises one or more protease cleavage sites. In some embodiments, the protease cleavage site is located on one or more of the N-terminus or the C-terminus of the CDKL5 polypeptide. Exemplary protease cleavage sites include, but are not limited to, cleavage sites sensitive to thrombin, furin, factor Xa, metalloproteases, enterokinases, cathepsin, HRV3C, TEV, and combinations thereof.

[0098] Various alignment algorithms and/or programs may be used to calculate the identity between two sequences, including FASTA, or BLAST which are available as a part of the GCG sequence analysis package (University of Wisconsin, Madison, Wis.), and can be used with, e.g., default setting. For example, polypeptides having at least 98%, 98.5%, 99% or 99.5% identity to specific polypeptides described herein and preferably exhibiting substantially the same functions, as well as polynucleotide encoding such polypeptides, are contemplated. Unless otherwise indicated a similarity score will be based on use of BLOSUM62. When BLASTP is used, the percent similarity is based on the BLASTP positives score and the percent sequence identity is based on the BLASTP identities score. BLASTP “Identities” shows the number and fraction of total residues in the high scoring sequence pairs which are identical; and BLASTP “Positives” shows the number and fraction of residues for which the alignment scores have positive values and which are similar to each other. Amino acid sequences having these degrees of identity or similarity or any intermediate degree of identity of similarity to the amino acid sequences disclosed herein are contemplated and encompassed by this disclosure. The polynucleotide sequences of similar polypeptides are deduced using the genetic code and may be obtained by conventional means, in particular by reverse translating its amino acid sequence using the genetic code.

[0099] One skilled in the art can readily derive a polynucleotide sequence encoding a particular polypeptide sequence. Such polynucleotide sequence can be codon optimized for expression in the target cell using commercially available products, such as using the OptimumGene™ codon optimization tool (GenScript, Piscataway, N.J.).

### CDKL5₁₀₇ N-Linked Glycosylation Variants

[0100] Various embodiments of the present invention provide novel CDKL5 variants that have one or more mutations to remove one or more N-linked glycosylation sites from the CDKL5 polypeptide. The wild-type human isoform CDKL5₁₀₇ contains 10 potential N-linked glycosylation sites and the wild-type human isoform CDKL5₁₁₅ contains 8 potential N-linked glycosylation sites. One of these glycosylation sites includes the TEY (Thr-Glu-Tyr) motif: NYTEY (Asn-Tyr-Thr-Glu-Tyr), and thus one of the glycosylation sites resides in the kinase domain. As such, there is a high likelihood that glycosylation at the Asn-Tyr-Thr-Glu-Tyr site can interfere with phosphorylation of the Thr-Glu-Tyr motif. Generally, sequences of Asn-X-Ser or Asn-X-Thr in the protein amino acid sequence indicate potential glycosylation sites, with the exception that X cannot be His or Pro. Accordingly, various embodiments of the present invention provide CDKL5 polypeptides that have one or more asparagine (aka Asn or N) residues substituted with a different amino acid such as glutamine (aka Gln or Q) residues. One potential advantage of choosing glutamine for the substitution is that this amino acid is structurally similar to asparagine, with only an additional methylene unit present in the glutamine residue. However, other amino acids can also be used as substitutions for the asparagine residue(s). Alternatively, the glycosylation site can be altered by changing the third amino acid in the Asn-X-Ser or Asn-X-Thr sequence to another amino acid that is not serine (aka S or Ser) or threonine (aka T or Thr) and/or changing the second amino acid to histidine (aka H or His) or proline (aka P or Pro).

[0101] Embodiments of the present invention also provide CDKL5 polynucleotides that encode CDKL5 polypeptides that have one or more Asn residues substituted with another amino acid such as Gln residues. For example, one or more AAC, AAT or AAU sequences (which encode Asn) can be substituted with one or more CAA or CAG sequences (which encode Gln). Again, other alterations in the CDKL5 polynucleotides can encode other changes to the glycosylation sites such as substituting the second amino acid with His or Pro and/or changing the third amino acid to be another amino acid that is not Ser or Thr.

[0102] In one or more embodiments, the CDKL5 polypeptide has at least 98%, at least 98.5%, at least 99% or at least 99.5% sequence identity to SEQ ID NO: 13, SEQ ID NO: 14, SEQ ID NO: 15, SEQ ID NO: 16, SEQ ID NO: 17, SEQ ID NO: 18, SEQ ID NO: 19, SEQ ID NO: 20, SEQ ID NO: 21, SEQ ID NO: 22, SEQ ID NO: 23, SEQ ID NO: 24 or SEQ ID NO: 25. The CDKL5 polypeptide may contain deletions, substitutions and/or insertions relative to SEQ ID NO: 13, SEQ ID NO: 14, SEQ ID NO: 15, SEQ ID NO: 16, SEQ ID NO: 17, SEQ ID NO: 18, SEQ ID NO: 19, SEQ ID NO: 20, SEQ ID NO: 21, SEQ ID NO: 22, SEQ ID NO: 23, SEQ ID NO: 24 or SEQ ID NO: 25, such as having 1, 2, 3, 4, 5, 6, 7, 8, 9, 10, 11, 12, 13, 14, 15 or more deletions, substitutions and/or insertions to the amino acid sequence described by SEQ ID NO: 13, SEQ ID NO: 14, SEQ ID NO: 15, SEQ ID NO: 16, SEQ ID NO: 17, SEQ ID NO: 18, SEQ ID NO: 19, SEQ ID NO: 20, SEQ ID NO: 21, SEQ ID NO: 22, SEQ ID NO: 23, SEQ ID NO: 24 or SEQ ID NO: 25.

[0103] In one or more embodiments, the CDKL5 polypeptide comprises one or more affinity-tags. In one or more embodiments, the affinity-tag is located on one or more of the N-terminus or the C-terminus of the CDKL5 polypeptide. Examples of tags that can be added to the fusion proteins include, but are not limited to, epitope tags (e.g. MYC, HA, V5, NE, StrepII, Twin-Strep-tag®, HPC4), glutathione S-transferase (GST), maltose-binding protein (MBP), calmodulin-binding peptide (CBP), FLAG®, 3×FLAG®, polyhistidine (His), and combinations thereof.

[0104] In one or more embodiments, the CDKL5 polypeptide comprises one or more protease cleavage sites. In some embodiments, the protease cleavage site is located on one or more of the N-terminus or the C-terminus of the CDKL5 polypeptide. Exemplary protease cleavage sites include, but are not limited to, cleavage sites sensitive to thrombin, furin, factor Xa, metalloproteases, enterokinases, cathepsin, HRV3C, TEV, and combinations thereof.

### Cell-Penetrating Peptides (CPPs)

[0105] A variety of viral and cellular proteins possess basic polypeptide sequences that mediate translocation across cellular membranes. The capacity to translocate across cellular membranes has become an important tool for the delivery of high molecular weight polypeptides across membranes. The phrase “protein transduction domain” (PTD) and “cell-penetrating peptides” (CPPs) are usually used to refer to short peptides (<30 amino acids) that can traverse the plasma membrane of many, if not all, mammalian cells. After studies to identify the specific properties of the domain that allow them to collectively cross the plasma membrane, researchers have observed that these domains contain a large number of basic amino acid residues such as lysine and arginine. Thus, cell-penetrating peptides fall into two classes: the first consisting of amphipathic helical peptides that contain lysine residues which contribute a positive charge, while the second class includes arginine-rich peptides. These peptides could have therapeutic potential if used in combination with other proteins that are difficult to deliver to intracellular targets. The most frequent experimental uses of PTDs are TAT, Antennapedia (Antp), and other poly-arginine peptides.

[0106] Thus far, TAT has been the best characterized of the PTDs, and has been used to successfully deliver small cargoes, such as short peptides and oligonucleotides, to intercellular targets. HIV-TAT (HIV Transactivator of Transcription) is an 86-amino acid protein involved in the replication of human immunodeficiency virus type 1 (HIV-1), and many studies have shown that TAT is able to translocate through the plasma membrane and reach the nucleus in order to activate transcription of the viral genome. Studies have also shown that TAT retains its penetration properties when coupled to several different proteins. In an effort to understand which areas of the TAT protein are critical to the translocation property, experiments have been conducted in which different length peptide fragments of TAT are synthesized and their penetration capabilities are assessed. (Lebleu et al. “A Truncated HIV-1 TAT Protein Basic Domain Rapidly Translocates through the Plasma Membrane and Accumulates in the Cell Nucleus.” J. Biol. Chem. 1997, 272:16010-16017). A region of basic amino acids has been identified as the aspect of TAT that retains this penetration property, and experiments in which a TAT protein without this basic amino acid cluster is unable to penetrate the cellular plasma membrane. In some instances, the shorter sequence cell-penetrating peptide has been modified to prevent cleavage during secretion by endoprotease enzymes such as furin. These modifications change the shortened cell-penetrating TAT amino acid sequence from YGRKKRRQRRR to YARKAARQARA, and this short peptide is referred to as TATκ.

[0107] The exact mechanism in which TAT is able to translocate across the plasma membrane remains uncertain. Recent work has explored the possibility that a special type of endocytosis is involved with TAT uptake, and a few cell lines have been identified that appear resistant to TAT penetration. The specific cargo to be delivered by TAT may also play a role in the efficacy of delivery. Previous research data have suggested that a TAT fusion protein has better cellular uptake when it is prepared in denaturing conditions, because correctly folded protein cargo likely requires much more energy (delta-G) to cross the plasma membrane due to structural constraints.

[0108] The capacity of the intracellular protein chaperones to refold the TAT cargo likely varies based on the identity and size of the protein cargo to be re-folded. In some instances, TAT-fusion proteins precipitate when placed in an aqueous environment and therefore cannot be prepared in a denatured manner nor remain stable for very long in native conformations. The design of the TAT-fusion protein must also be tailored to the specific cargo to be delivered. If the cargo protein is tightly associated at the N-terminus and the TAT domain is also found at the N-terminus, the TAT translocation domain may be buried in the cargo protein and transduction may be poor.

[0109] Numerous TAT-cargo variants have been successfully delivered into a variety of cell types, including primary culture cells, transformed cells, and cells present in mouse tissue. In culture, the TAT-fusion proteins generally diffuse easily into and out of cells, leading to a very rapid establishment of uniform concentration.

[0110] Many pharmaceutical agents such as enzymes, antibodies, other proteins, or even drug-loaded carrier particles need to be delivered intracellularly to exert their therapeutic action inside the cytoplasm, nucleus, or other specific organelles. Thus, the delivery of these different types of large molecules represents a significant challenge in the development of biologics. Current data suggest that TAT is able to cross the plasma membrane through more than one mechanism.

[0111] A TAT transduction domain has also been fused to the enzyme superoxide dismutase (SOD). (Torchilin, “Intracellular delivery of protein and peptide therapeutics.” Protein Therapeutics. 2008. 5(2-3):e95-e103). This fusion protein was used to demonstrate that it could translocate across cell membranes in order to deliver the SOD enzyme to the intracellular environment, and thus here the fusion protein has therapeutic potential in treating enzyme deficiency disorders that lead to higher accumulation of reactive oxygen species and oxidative stress on a host cell.

[0112] TAT fusion proteins have also been shown to transduce across the blood-brain barrier. A TAT domain fused to the neuroprotectant protein Bc1-xL was able to penetrate cells rapidly in culture, and when administered to mice suffering from cerebral ischemia, the fusion protein transduced brain cells within 1-2 hours. After transduction, the cerebral infarct was reduced in size in a dose-dependent manner (Cao, G. et al., “In Vivo Delivery of a Bc1-xL Fusion Protein Containing the TAT Protein Transduction Domain Protects against Ischemic Brain Injury and Neuronal Apoptosis.” J. Neurosci. 22, 5423, 2002.)

[0113] In various embodiments, the CDKL5 variants described herein are operably linked to a CPP such as TAT, modified TAT (TATκ), Transportan, Antennapedia or P97. As used herein, TAT can refer to the original TAT peptide having 11 amino acids (designated TAT11) or can refer to a TAT peptide having an additional 16 N-terminal amino acids (designated as TAT28) that are derived from the polylinker of the plasmid used for cloning. Similarly, TATκ can refer to a modified version of TAT11 (designated TATκ11) or a modified version of TAT28 (designated TATκ28). The TATκ28 can be further modified (designated TATκκ28) to remove a potential additional weak furin site. The amino acid sequences of the CPPs TAT28, TATκ28, TAT11, TATκ11, Transportan, Antennapedia, P97 and TATκκ28 are provided in SEQ ID NO: 31, SEQ ID NO: 32, SEQ ID NO: 33, SEQ ID NO: 34, SEQ ID NO: 35, SEQ ID NO: 36, SEQ ID NO: 37 and SEQ ID NO: 167, respectively.

[0114] In some embodiments, the CPP has at least 90% sequence identity to SEQ ID NO: 31, SEQ ID NO: 32, SEQ ID NO: 33, SEQ ID NO: 34, SEQ ID NO: 35, SEQ ID NO: 36, SEQ ID NO: 37 or SEQ ID NO: 167. In some embodiments, the CPP has at least 95% sequence identity to SEQ ID NO: 31, SEQ ID NO: 32, SEQ ID NO: 33, SEQ ID NO: 34, SEQ ID NO: 35, SEQ ID NO: 36, SEQ ID NO: 37 or SEQ ID NO: 167. In some embodiments, the CPP has 100% sequence identity to SEQ ID NO: 31, SEQ ID NO: 32, SEQ ID NO: 33, SEQ ID NO: 34, SEQ ID NO: 35, SEQ ID NO: 36, SEQ ID NO: 37 or SEQ ID NO: 167. In some embodiments, the CPP has at least 90% sequence identity to SEQ ID NO: 32, SEQ ID NO: 34, SEQ ID NO: 35, SEQ ID NO: 36, SEQ ID NO: 37 or SEQ ID NO: 167. In some embodiments, the CPP has at least 95% sequence identity to SEQ ID NO: 32, SEQ ID NO: 34, SEQ ID NO: 35, SEQ ID NO: 36, SEQ ID NO: 37 or SEQ ID NO: 167. In some embodiments, the CPP has 100% sequence identity to SEQ ID NO: 32, SEQ ID NO: 34, SEQ ID NO: 35, SEQ ID NO: 36, SEQ ID NO: 37 or SEQ ID NO: 167. In various embodiments, the CPP does not have the sequence of SEQ ID NO: 34.

[0115] In various embodiments, the CPP can have an N-terminal glycine added. For example, TATκ28 and TAT28 would otherwise have an N-terminal aspartate residue, which has a low stability. Adding an N-terminal glycine to the sequence can increase protein stability via the N-end rule. Accordingly, in some embodiments, any of the fusion proteins that have a leader signal polypeptide can have a glycine added at the C-terminal end of the leader signal polypeptide, such that upon cleavage of the leader signal polypeptide, the new N-terminus of the fusion protein will begin with glycine. In an analogous manner, those fusion proteins lacking a leader signal polypeptide can also have a glycine added between the N-terminal methionine and the remainder of the fusion protein. Also in analogous manner, those fusion proteins having a CPP other than TAT28 or TATκ28, can also have a glycine added between a leader signal polypeptide and a CPP.

[0116] In one or more embodiments, the CPP is operatively coupled to the N-terminus of the CDKL5 polypeptide. In one or more embodiments, the CPP is operatively coupled to the C-terminus of the CDKL5 polypeptide.

[0117] In one or more embodiments, the CPP comprises one or more affinity-tags. In one or more embodiments, the affinity-tag is located on one or more of the N-terminus or the C-terminus of the CPP. Examples of affinity-tags that can be added to the CPP include, but are not limited to, epitope tags (e.g. MYC, HA, V5, NE, StrepII, Twin-Strep-tag®, HPC4), glutathione S-transferase (GST), maltose-binding protein (MBP), calmodulin-binding peptide (CBP), FLAG®, 3×FLAG® polyhistidine (His), and combinations thereof.

[0118] In one or more embodiments, the CPP comprises one or more protease cleavage sites. In some embodiments, the protease cleavage site is located on one or more of the N-terminus or the C-terminus of the CPP. Exemplary protease cleavage sites include, but are not limited to, cleavage sites sensitive to thrombin, furin, factor Xa, metalloproteases, enterokinases, cathepsin, HRV3C, TEV, and combinations thereof.

### Fusion Proteins Comprising CDKL5 Variants

[0119] As described above, CDKL5 variants can be used in fusion proteins, such as proteins that also contain a CPP. Other polypeptides can also be incorporated into such fusion proteins, such as leader signal polypeptides to enhance protein secretion or affinity-tags for detecting and/or purifying the fusion proteins, as well as linker polypeptides that can be used to link functional polypeptides.

[0120] Examples of leader signal polypeptides include, but are not limited to, modified fragments of human immunoglobulin heavy chain binding protein (modified BiP, e.g. SEQ ID NO: 38, SEQ ID NO: 39, SEQ ID NO: 40, SEQ ID NO: 41 or SEQ ID NO: 168), murine Igκ chain leader polypeptide (SEQ ID NO: 42, e.g. pSecTag2 from ThermoFisher vectors) or insulin growth factor peptides (IGF2) such as the wild-type IFG2 (SEQ ID NO: 156) or variants thereof (e.g. SEQ ID NOS 157-166). Examples of modified BiP signal polypeptides include those described in U.S. Pat. No. 9,279,007, which is hereby incorporated by reference in its entirety. Other examples of modified BiP signal polypeptides include mvBIP, which has a valine added before the lysine in mBiP as shown in SEQ ID NO: 168.

[0121] In one or more embodiments, the fusion protein comprises a CDKL5 polypeptide having an N-terminal CPP, optionally with a leader signal polypeptide before the N-terminal CPP. In one or more embodiments, the fusion protein comprises a CDKL5 polypeptide having a C-terminal CPP, optionally with a leader signal polypeptide before the CDKL5 polypeptide. In one or more embodiments, the fusion protein comprises a leader signal peptide and a CDKL5 polypeptide without a CPP.

[0122] Examples of affinity-tags that can be added to the fusion proteins include, but are not limited to, epitope tags (e.g. MYC, HA, V5, NE, StrepII, Twin-Strep-tag®, HPC4), glutathione S-transferase (GST), maltose-binding protein (MBP), calmodulin-binding peptide (CBP), FLAG®, 3×FLAG®, polyhistidine (His), and combinations thereof.

[0123] Some embodiments of the fusion protein may also include a protease cleavage site. In some embodiments, the protease cleavage site is located on the N-terminus of affinity-tag. In some embodiments, the protease cleavage site is located on the C-terminus of affinity-tag. Exemplary protease cleavage sites include, but are not limited to, cleavage sites sensitive to thrombin, furin, factor Xa, metalloproteases, enterokinases, cathepsin, HRV3C, TEV and combination thereof.

### Methods of Protein Production

[0124] The recombinant protein (e.g. CDKL5 variant or fusion protein) can be expressed in and secreted from host cells using appropriate vectors. For example, mammalian cells (e.g., CHO, HeLa or HEK cells), insect cells (e.g. Sf9 or BTI-Tn-5B1-4) or bacterial cells (e.g., E. coli or P. haloplanktis TAC 125 cells) can be used. Exemplary plasmids are described in the examples below and shown in FIGS. 2A-2BK. Those of skill in the art can select alternative vectors suitable for transforming, transfecting, or transducing cells to produce the CDKL5 variants and fusion proteins described herein. FIG. 10 shows relative CDKL5 expression and yield in bacterial, mammalian and insect cell expression system.

[0125] After expression and secretion, recombinant protein can be recovered and purified from the surrounding cell culture media using standard techniques. Alternatively, recombinant protein can be isolated and purified directly from cells, rather than the medium.

[0126] In some embodiments, the BTI-Tn-5B1-4 cells are used to express and purify CDKL5 variant or fusion protein.

[0127] For lysis, the cells expressing the CDKL variant or fusion protein may be pelleted and subsequently resuspended into a lysis buffer. The resuspended cells may be then incubated in a cavitation chamber that is charged from about 100 PSI to about 2000 PSI with nitrogen gas. The resuspended cells may be incubated in the charged cavitation chamber for about 5 minutes to about 60 minutes. In some embodiments, the resuspended cells may be incubated in the cavitation chamber charged to 750 PSI with nitrogen gas. In some embodiments, the resuspended cells may be incubated in the charged cavitation chamber for 15 minutes. An effluent from the cavitation chamber after incubation may be then transferred on ice. A detergent may be added in the effluent followed by incubation on ice for about 5 minutes to about 60 minutes. In some embodiments, the detergent is added in the amount of about 0.1% (w/v) to about 5% (w/v). In some embodiments, the detergent is Triton X-100. The effluent with the detergent is then sonicated to lyse the cells. After lysis, soluble fractions and insoluble fractions may be separated. In some embodiments, the soluble fraction and insoluble fraction may be separated by centrifugation. The soluble material may be filtered. In some embodiments, the soluble material may be filtered through 0.45 μm filter.

[0128] For purification of the CDKL5 variants or the fusion protein, the filtered soluble material is then subject to purification. In some embodiments, the CDKL5 variants or the fusion protein is purified by a chromatography technique. In some embodiments, the chromatography technique is an affinity chromatography. In some embodiments, the CDKL5 variant or the fusion protein comprises one or more affinity tags. In some embodiments, the affinity-tag include, but are not limited to, epitope tags (e.g. MYC, HA, V5, NE, StrepII, Twin-Strep-tag®, HPC4), glutathione S-transferase (GST), maltose-binding protein (MBP), calmodulin-binding peptide (CBP), FLAG®, 3×FLAG®, polyhistidine (His) and combination thereof. In some embodiments, the CDKL5 variant or the fusion protein has a Twin-Strep-tag®. In some embodiments, the CDKL5 variant or the fusion protein with the affinity-tag is purified on a purification resin. In some embodiments of the CDKL5 variant or the fusion protein with a Twin-Strep-tag®, the purification resin is a strep-tactin resin.

[0129] Some embodiments of the CDKL5 variant or the fusion protein may also include one or more protease cleavage sites. In some embodiments, the protease cleavage site is located on the N-terminus of the CDKL5 variant or the fusion protein. In some embodiments, the protease cleavage site is located on the C-terminus of the CDKL5 variant or the fusion protein. In some embodiments, the protease cleavage site is located on N-terminus and C-terminus of the CDKL5 variant or the fusion protein. In some embodiments, the cleavage is performed when the CDKL5 variant or the fusion protein is bound to the purification resin. In some embodiments, the cleavage is performed when the CDKL5 variant or the fusion protein with the Twin-Strep-tag® is bound to the strep-tactin resin.

### Protein Replacement Therapy

[0130] In one or more embodiments, a subject may be administered with the CDKL5 protein or variants or fusion proteins. In some embodiments, the subjects may be humans, domestic and farm animals, and laboratory, zoo, sports, or pet animals, such as dogs, horses, cats, cows, sheep, goats, pigs, mice, rats, rabbits, guinea pigs, monkeys etc. In some embodiments, the subject is a human.

[0131] In one or more embodiments, a cellular uptake of the CDKL5 protein or variants or fusion proteins is determined in cells isolated from the subject. In some embodiments, the cells may be isolated from rats. In some embodiments, the cells may be neuronal cells. In some embodiments, the cells may be embryonic primary cortical neurons. In some embodiments, the embryonic primary cortical neurons may be isolated from rats. In some embodiments, the cells may be cultured and incubated with the CDKL5 protein or variants for a duration of time. The duration of time may be at least 5 minutes, at least 10 minutes, at least 15 minutes, at least 20 minutes, at least 25 minutes, at least 30 minutes, at least 40 minutes, at least 50 minutes or at least 60 minutes. In some embodiments the duration of time may be from 5 minutes to 24 hours, 15 minutes to 24 hour, 30 minutes to 24 hour, 1 hour to 24 hour, 4 hour to 24 hour, 8 hour to 24 hour, 12 hour to 24 hour, 5 minutes to 12 hours, 15 minutes to 12 hour, 30 minutes to 12 hour, 1 hour to 12 hour, 2 hour to 12 hour, 4 hour to 12 hour, 6 hour to 12 hour, 8 hour to 12 hour, 10 hour to 12 hour, 5 minutes to 6 hours, 15 minutes to 6 hour, 30 minutes to 6 hour, 1 hour to 6 hour, 1.5 hour to 6 hour, 2 hour to 6 hour, 2.5 hour to 6 hour, 3 hour to 6 hour, 4 hour to 6 hour 5 hour to 6 hour, 5 minutes to 4 hours, 15 minutes to 4 hour, 30 minutes to 4 hour, 1 hour to 4 hour, 1.5 hour to 4 hour, 2 hour to 4 hour, 2.5 hour to 4 hour, 3 hour to 4 hour, 5 minutes to 2 hours, 15 minutes to 2 hour, 30 minutes to 2 hour, 1 hour to 2 hour, 1.5 hour to 2 hour, 5 minutes to 1 hours, 15 minutes to 1 hour or 30 minutes to 1 hour.

### Gene Therapy

[0132] Any of the CDKL5 polypeptides and/or fusion proteins described herein can be utilized in gene therapy via an appropriate polynucleotide (e.g. DNA or RNA) encoding the desired CDKL5 polypeptide and/or fusion protein.

[0133] In various embodiments, gene therapy is provided through the use of a composition comprising a gene therapy delivery system and a CDKL5 polynucleotide. Exemplary gene therapy delivery systems include, but are not limited to, viral vectors, liposomes, lipid-nucleic acid nanoparticles, exosomes and gene editing systems. For example, a gene editing system such as Clustered Regularly Interspaced Short Palindromic Repeat (CRISPR) associated protein 9 (CRISPR-Cas-9), Transcription activator-like effector nucleases (TALEN) or ZNF (Zinc finger proteins) can be used to insert the CDKL5 polynucleotide into the DNA of the host cell.

[0134] Viral vectors include, but are not limited to, adenoviral vectors, adeno-associated viral (AAV) vectors, lentiviral vectors, retroviral vectors, poxviral vectors or herpes simplex viral vectors. Viral vectors typically utilize a viral particle (virion) including an outer protein shell (capsid) and one or more DNA or RNA sequences (viral polynucleotides) encapsulated in the capsid. For example, AAV vectors typically include one or more inverted terminal repeat (ITR) sequences, a replication (Rep) gene sequence, and a capsid (Cap) gene sequence. The ITR, Rep and Cap sequences may be included in the same plasmid (in cis), or may be provided in separate plasmids (in trans). The capsid may be derived from the same serotype as the ITR sequences, or the AAV vector can be a hybrid vector utilizing ITR sequences and capsids derived from different AAV serotypes. Exemplary AAV serotypes include AAV1, AAV 2, AAV 3, AAV 4, AAV 5, AAV 6, AAV 7, AAV 8, AAV 9, AAV10, AAV11, hybrid serotypes, and synthetic serotypes. An exemplary set of ITRs is provided in SEQ ID NO: 27 (L-ITR) and SEQ ID NO: 28 (R-ITR), which are derived from AAV2.

[0135] The viral vectors also may include additional elements for increasing expression and/or stabilizing the vector such as promoters (e.g., hybrid CBA promoter (CBh) and human synapsin 1 promoter (hSyn1)), a polyadenylation signals (e.g. Bovine growth hormone polyadenylation signal (bGHpolyA)), stabilizing elements (e.g. Woodchuck Hepatitis Virus (WHP) Posttranscriptional Regulatory Element (WPRE)) and/or an SV40 intron. The DNA sequences for CBh and hSyn1 are provided in SEQ ID NO: 29 and SEQ ID NO: 30, respectively.

[0136] The gene therapy delivery system can be utilized to deliver the CDKL5 polynucleotide to the target cells so that the CDKL5 polypeptide (or fusion protein comprising the same) can be expressed in the target cells. In various embodiments, the CDKL5 polypeptide (e.g. wild-type CDKL5 polypeptides, CDKL5 variants with one or more N-linked glycosylation sites removed and/or shorter CDKL5 variants) (or fusion protein comprising the same) is expressed in the target cell and utilized in the same cell. In other embodiments, the CDKL5 polypeptide (or fusion protein comprising the same) is expressed in a first cell, secreted, and then penetrates into a second cell. In such embodiments, a leader signal polypeptide and/or a cell-penetration may be used to enhance secretion and/or penetration of the CDKL5 polypeptide. Without wishing to be bound by any particular theory, it is believed that secretion and penetration of CDKL5 polypeptide can be used to enhance the effects of gene therapy over conventional gene therapy approaches that only introduce DNA and RNA into the patient, as transduction in gene therapy may only be limited to a certain portion of the patient's cells (e.g. 10% of the target patient cells are successfully transduced with the DNA/RNA). In this way, the successfully transduced cells may be used to express the CDKL5 polypeptide (or fusion protein comprising the same) for both the transduced cells and neighboring cells that were not successfully transduced.

### Cross-Correction

[0137] Another aspect of the invention can include cross-correction. The genetherapy may not be effective to successfully transfect all defective cells. In one or more embodiments, a genetic defect in non-transfected cells can be corrected by the neighboring successfully transfected cells. For example, the CDKL5 polypeptide or fusion protein may be expressed in a successfully transfected cell, secreted from that cell, and taken up by a neighboring cell that was not successfully transfected. The defect may be cross-corrected by any of the gene therapy methods described herein via an appropriate polynucleotide (e.g. DNA or RNA) encoding the desired CDKL5 polypeptide and/or fusion protein. Any of the CDKL5 polypeptides and/or fusion proteins described herein can be utilized to cross-correct a CDKL5-related defect.

[0138] In one or more embodiments, a CDKL5 null subject is used for determining the fusion protein induced cross-correction. In some embodiments, the subject is a mouse. In some embodiments, a viral vector may be used to correct the CDKL5 defect. In a particular embodiment, AAV vector was used to correct the CDKL5 defect. In a particular embodiment, the AAV vector comprises a AAV-PHP.B.CBH.BIP-TATκ28-CDKL5.SV40. In a particular embodiment, the viral vector comprising corrective gene is administered in a dose sufficient to correct the genetic defect. In some embodiments, the sufficient dose for correcting genetic defect in mice is in a range of 10×e² GC/mice to 10×e¹⁵ GC/mice. In some embodiments, the sufficient dose for correcting genetic defect in mice may be 10×e² GC/mice, 10×e³ GC/mice, 10×e⁴ GC/mice, 10×e⁵ GC/mice, 10×e⁶ GC/mice, 10×e⁷ GC/mice, 10×e⁸ GC/mice, 10×e⁹ GC/mice, 10×e¹⁰ GC/mice, 10×e¹¹ GC/mice, 10×e¹² GC/mice, 10×e¹³ GC/mice, 10×e¹⁴ GC/mice or 10×e¹⁵ GC/mice. Exemplary routes of administration include, but are not limited to, intrathecal, intravenous, intracisternal, retro-orbital, intraperitoneal, intracerebroventrical or intraparenchymal administration.

[0139] In one or more embodiments, the CDKL5 null mice may be divided into a treatment group and a control group. Each group, the treatment group and the control group, may further be divided into two subgroups based on route of administration. More than one route can be used concurrently, if desired. In one or more embodiments, each subgroup may be administered AAV-PHP.B.CBH.BIP-TATκ28-CDKL5.SV40 dose through either intracerebroventricular (ICV) or retro orbital (RO) route of administration. Each subgroup received AAV-PHP.B.CBH.BIP-TATκ28-CDKL5.SV40 dose in an amount of 10×e⁸ GC/mice, 10×e⁹ GC/mice or 10×e¹⁰ GC/mice. Three months post-administration, the impact of the vector on behavioral endpoints may be assessed and the mice may be euthanized for transgene expression analysis.

[0140] After euthanizing mice, various section of brain may be taken including but not limited to sagittal section. The sections may be immunostained with DAPI, anti-NeuN antibody, anti-CDKL5 RNA antibody and anti-CDKL5 protein antibody. The sections may be taken from isocortex, striatum, thalamus and hippocampal formation section of brains.

[0141] The immunostained images may be analyzed using Visiopharm software. The immunostained cells may be divided into six groups: (1) DAPI stain to identify cells; (2) NeuN stain to identify neurons; (3) Neurons having CDKL5 mRNA and CDKL5 protein; (4) Neurons having CDKL5 mRNA; (5) Cross-corrected neurons; and (6) Cross-corrected non-neurons. The result of image analysis may be further subject to a statistical analysis for cross-corrected neurons and non-neurons.

### Formulations, Methods of Treatment and Use

[0142] The gene therapy compositions (e.g. comprising CDKL5 polynucleotides) or the protein replacement therapy compositions (e.g. comprising recombinant proteins including CDKL5 variants or fusion proteins), can be formulated in accordance with the routine procedures as a pharmaceutical composition adapted for administration to human beings. For example, in one or more embodiments, a composition for intravenous administration is a solution in sterile isotonic aqueous buffer. Where necessary, the composition may also include a solubilizing agent and a local anesthetic to ease pain at the site of the injection. Generally, the ingredients are supplied either separately or mixed together in unit dosage form, for example, as a dry lyophilized powder or water free concentrate in a hermetically sealed container such as an ampoule or sachet indicating the quantity of active agent. Where the composition is to be administered by infusion, it can be dispensed with an infusion bottle containing sterile pharmaceutical grade water, saline or dextrose/water. Where the composition is administered by injection, an ampule of sterile water for injection or saline can be provided so that the ingredients may be mixed prior to administration.

[0143] Gene therapy compositions (e.g. comprising CDKL5 polynucleotides) or protein replacement therapy compositions (e.g. comprising recombinant proteins including CDKL5 variants or fusion proteins) (or a composition or medicament containing the gene therapy composition or protein replacement therapy composition) are administered by an appropriate route. In one or more embodiments, the gene therapy composition or protein replacement therapy composition is administered intravenously. In other embodiments, the gene therapy composition or protein replacement therapy composition is administered by direct administration to a target tissue, such as to heart or skeletal muscle (e.g., intramuscular; intraventricularly), or nervous system (e.g., intrathecal delivery—delivery into the space under the arachnoid membrane of the brain or spinal cord). More than one route can be used concurrently, if desired. Exemplary routes of administration include, but are not limited to, intrathecal, intravenous, intracisternal, intracerebroventrical or intraparenchymal administration.

[0144] The gene therapy composition (e.g. comprising CDKL5 polynucleotides) or protein replacement therapy composition (e.g. comprising recombinant protein including CDKL5 variants or fusion proteins) (or a composition or medicament containing such gene therapy composition or protein replacement therapy) is administered in a therapeutically effective amount (e.g., a dosage amount that, when administered at regular intervals, is sufficient to treat the disease, such as by ameliorating symptoms associated with the disease, preventing or delaying the onset of the disease, and/or lessening the severity or frequency of symptoms of the disease). The amount which will be therapeutically effective in the treatment of the disease will depend on the nature and extent of the disease's effects. In addition, in vitro or in vivo assays may optionally be employed to help identify optimal dosage ranges. The precise dose to be employed will also depend on the route of administration, and the seriousness of the disease, and should be decided according to the judgment of a practitioner and each patient's circumstances. Effective doses may be extrapolated from dose-response curves derived from in vitro or animal model test systems.

[0145] The therapeutically effective amount of gene therapy composition (e.g. comprising CDKL5 polynucleotides) or protein replacement therapy composition (e.g. comprising recombinant protein including CDKL5 variants or fusion proteins) (or a composition or medicament containing such gene therapy composition or protein replacement therapy) can be administered at regular intervals, depending on the nature and extent of the disease's effects, and/or on an ongoing basis. Administration at a “regular interval,” as used herein, indicates that the therapeutically effective amount is administered periodically (as distinguished from a one-time dose). The administration interval for a single individual need not be a fixed interval, but can be varied over time, depending on the needs of the individual.

[0146] The gene therapy composition (e.g. comprising CDKL5 polynucleotides) or protein replacement therapy composition (e.g. comprising recombinant protein including CDKL5 variants or fusion proteins) (or a composition or medicament containing such gene therapy composition or protein replacement therapy composition) may be prepared for later use, such as in a unit dose vial or syringe, or in a bottle or bag for intravenous administration. Kits containing the gene therapy composition (e.g. comprising CDKL5 polynucleotides) or protein replacement therapy composition (e.g. comprising recombinant protein including CDKL5 variants or fusion proteins) (or a composition or medicament containing such gene therapy composition or protein replacement therapy composition), as well as optional excipients or other active ingredients, such as other drugs, may be enclosed in packaging material and accompanied by instructions for reconstitution, dilution or dosing for treating a subject in need of treatment, such as a patient having a CDKL5 deficiency, Rett syndrome, or a Rett syndrome variant.

### EXAMPLES

### Examples 1-12—CDKL5 Fusion Proteins

[0147] FIGS. 2A-2BK show plasmids for expressing fusion proteins in suitable cells, such as mammalian cells (e.g., CHO cells or HEK cells), insect cells (e.g. Sf9 cells) or bacterial cells (e.g., E. coli cells). These proteins have the amino acid sequences set forth in SEQ ID NOS: 43-105. The numbering of the deletions or truncations for the fusion proteins of SEQ ID NOS: 49-59 comprising CDKL5 truncation variants is relative to the full-length CDKL5₁₀₇ polypeptide (1-960). The fusion proteins of SEQ ID NOS: 93-105 comprising CDKL5 glycosylation variants have the specified N-linked glycosylation sites altered by substitutions of Asn for Gln, e.g. “1-10NQ” indicates that all 10 N-linked glycosylation sites have been altered by substituting Asn for Gln and “2NQ” indicates that only the second N-linked glycosylation site has been altered by substituting Asn for Gln. Also, some N-linked glycosylation sites were predicted to have a higher likelihood of glycosylation than other sites, and thus these sites were investigated first. Based on this, the first 7 N-linked glycosylation sites investigated are labeled as sites 1-7 and are indicated in bold font in the amino acid sequences, and the next 3 N-linked glycosylation sites investigated are labeled as sites 8-10 and are indicated in bold and underlined font in the amino acid sequences. Therefore, the order of the N-linked glycosylation sites from the N-terminus to the C-terminus are 1, 2, 3, 8, 4, 9, 10, 5, 6 and 7. The numbering of the N-linked glycosylation sites relative to the full-length CDKL5-107 polypeptide (1-960) and motif sequence are as follows: 1=Asn159, NLS; 2=Asn167, NYT; 3=Asn348, NLS; 4=Asn500, NLS; 5=Asn764, NIS; 6=Asn942, NRT; 7=Asn945, NRS; 8=Asn363, NES; 9=Asn731, NVS; 10=Asn748, NHS.

[0148] In those constructs wherein CDKL5 is fused C-terminally to additional N-terminal amino acid sequences, the initial methionine (amino acid 1) of CDKL5 is removed. In these constructs, the CDKL5 polypeptide begins with the second amino acid, lysine. Although specific reference is made to N-terminal amino acid sequences (e.g. N-terminal CPPs), C-terminal amino acid sequences (e.g. C-terminal CPPs) are also encompassed by the present disclosure.

[0149] The abbreviations used in FIGS. 2A-2BK and SEQ ID NOS: 43-105 are summarized in Table 1 below:

TABLE 1

| Features | Description |
|---|---|
| pOptiVec | expression vector for CHO DG44 cells, using pCMV promoter for |
| | high expression of recombinant protein; from ThermoFisher Scientific |
| | Inc. |
| pEX-1 | expression vector for bacterial cells, using T7 promoter for high |
| | expression of recombinant protein; from OriGene Technologies, Inc |
| pT7CFE1 | expression vector for human cells, using T7 promoter for high |
| | expression of recombinant protein; from ThermoFisher Scientific Inc. |
| pVL1393 | expression vector for insect cells, using polyhedron promoter for high |
| | expression of recombinant protein; from Expression Systems, LLC |
| pCMV | allows high expression level of recombinant protein |
| enhancer and | |
| promoter | |
| Kozak | for proper initiation of translation |
| consensus | |
| MBiP | modified BiP leader signal polypeptide (from U.S. Pat. No. 9,279,007; |
| | SEQ ID NO. 20) for secretion of recombinant protein; |
| | MKLSLVAAMLLLLSLVAAMLLLLSAARA |
| mvBIP | further modified BiP leader signal polypeptide including valine before |
| | lysine, MVKLSLVAAMLLLLSLVAAMLLLLSAARA |
| Igκ | murine Igκ chain leader polypeptide for secretion of recombinant |
| | protein (from ThermoFisher vectors; e.g. pSecTag2); |
| | METDTLLLWVLLLWVPGSTG |
| TATκ28, | TATκ28 peptide, GDAAQPARRARRTKLAAYARKAARQARA |
| TATκ28p, | |
| Tκ28p | |
| TATκκ28 | TATκκ28 peptide, GDAAQPAARARRTKLAAYARKAARQARA |
| TAT28, | TAT28 peptide, GDAAQPARRARRTKLAAYGRKKRRQRRR |
| TAT28p, | |
| TT28p | |
| TATκ11 | TATκ11 peptide, YARKAARQARA |
| TAT11 | TAT11 peptide, YGRKKRRQRRR |
| Antp | Antennapedia peptide, RQIKIWFQNRRMKWKK |
| Transp | Transportan peptide, AGYLLGKINLKALAALAKKIL |
| P97 | P97 peptide, DSSHAFTLDELR |
| G4S linker | a short linker consisting of 4 glycine and 1 serine |
| CDKL5(107) | human CDKL5-107 isoform |
| CDKL5_107 | |
| CDKL5(115) | human CDKL5-115 isoform |
| CDKL5_115 | |
| delta###-### | refers to the deletion of ###-### amino acids to form truncated forms |
| | of protein |
| ##-##NQ | refers to the substitution of Asn to Gln at ##-## N-linked glycosylation |
| | sites |
| AMPH1 | gene encoding human Amphiphysin1 |
| eGFP | gene encoding the enhanced Green Fluorescent Protein; allows for |
| | detection using anti-GFP or fluorescence |
| NLS | gene encoding a nuclear localization signal |
| GST | glutathione S-transferase |
| PreScission, | PreScission protease cleavage site |
| P | |
| TEV | TEV protease cleavage recognition site; allows removal of 3XFLAG- |
| cleavage | HIS tag (or other tags) after initial purification |
| 3XFlagHis, | 3XFLAG tag, followed by Glycine-Alanine-Proline (a short linker), |
| FH | and 6xHis tag; Flag and His tag allows detection of fusion protein with |
| | anti-Flag and anti-His and allows purification |
| EMCV IRES | Internal Ribosome Entry Site from the Encephalomyocarditis Virus |
| | allows for cap-independent translation of DHFR |
| DHFR | Mus musculus (mouse) DHFR allows auxotrophic selection of |
| | transfected DG44 cells and for genomic amplification of stable cell |
| | lines using methotrexate (Mtx) |
| HSV Tk | Herpes Simplex Virus Thymidine Kinase polyadenylation signal |
| polyA | allows for efficient transcription termination and polyadenylation of |
| | mRNA |
| pUC Ori | pUC origin allows for high-copy number replication and growth in |
| | E. coli cells |
| bla promoter | promoter for ampicillin (bla) resistance gene |
| Bla | ampicillin resistance gene (β-lactamase) |

[0150] FIG. 2A shows an exemplary plasmid for expressing the fusion protein of SEQ ID NO: 43 in CHO cells. This fusion protein comprises the modified BiP leader signal polypeptide, TATκ28 and the full-length human CDKL5₁₀₇ isoform.

[0151] FIG. 2B shows an exemplary plasmid for expressing the fusion protein of SEQ ID NO: 44 in CHO cells. This fusion protein comprises the murine Igκ chain leader polypeptide, TATκ28 and the full-length human CDKL5₁₀₇ isoform.

[0152] FIG. 2C shows an exemplary plasmid for expressing the fusion protein of SEQ ID NO: 45 in CHO cells. This fusion protein comprises the modified BiP leader signal polypeptide, TATκ28 and the full-length human CDKL5₁₁₅ isoform.

[0153] FIG. 2D shows an exemplary plasmid for expressing the fusion protein of SEQ ID NO: 46 in CHO cells. This fusion protein comprises the murine Igκ chain leader polypeptide, TATκ28 and the full-length human CDKL5₁₁₅ isoform.

[0154] FIG. 2E shows an exemplary plasmid for expressing the fusion protein of SEQ ID NO: 47 in CHO cells. This fusion protein comprises TATκ28 and the full-length human CDKL5₁₀₇ isoform.

[0155] FIG. 2F shows an exemplary plasmid for expressing the fusion protein of SEQ ID NO: 48 in E. coli cells. This fusion protein comprises TATκ28 and the full-length human CDKL5₁₀₇ isoform.

[0156] FIG. 2G shows an exemplary plasmid for expressing the fusion protein of SEQ ID NO: 49 in E. coli cells. This fusion protein comprises TATκ28 and the CDKL5₁₀₇ variant of Construct 2.

[0157] FIG. 2H shows an exemplary plasmid for expressing the fusion protein of SEQ ID NO: 50 in E. coli cells. This fusion protein comprises TATκ28 and the CDKL5₁₀₇ variant of Construct 3.

[0158] FIG. 21 shows an exemplary plasmid for expressing the fusion protein of SEQ ID NO: 51 in E. coli cells. This fusion protein comprises TATκ28 and the CDKL5₁₀₇ variant of Construct 4.

[0159] FIG. 2J shows an exemplary plasmid for expressing the fusion protein of SEQ ID NO: 52 in E. coli cells. This fusion protein comprises TATκ28 and the CDKL5₁₀₇ variant of Construct 5.

[0160] FIG. 2K shows an exemplary plasmid for expressing the fusion protein of SEQ ID NO: 53 in E. coli cells. This fusion protein comprises TATκ28 and the CDKL5₁₀₇ variant of Construct 6.

[0161] FIG. 2L shows an exemplary plasmid for expressing the fusion protein of SEQ ID NO: 54 in E. coli cells. This fusion protein comprises TATκ28 and the CDKL5₁₀₇ variant of Construct 7.

[0162] FIG. 2M shows an exemplary plasmid for expressing the fusion protein of SEQ ID NO: 55 in E. coli cells. This fusion protein comprises TATκ28 and the CDKL5₁₀₇ variant of Construct 8.

[0163] FIG. 2N shows an exemplary plasmid for expressing the fusion protein of SEQ ID NO: 56 in E. coli cells. This fusion protein comprises TATκ28 and the CDKL5₁₀₇ variant of Construct 9.

[0164] FIG. 2O shows an exemplary plasmid for expressing the fusion protein of SEQ ID NO: 57 in E. coli cells. This fusion protein comprises TATκ28 and the CDKL5₁₀₇ variant of Construct 10.

[0165] FIG. 2P shows an exemplary plasmid for expressing the fusion protein of SEQ ID NO: 58 in E. coli cells. This fusion protein comprises TATκ28 and the CDKL5₁₀₇ variant of Construct 11.

[0166] FIG. 2Q shows an exemplary plasmid for expressing the fusion protein of SEQ ID NO: 59 in E. coli cells. This fusion protein comprises TATκ28 and the CDKL5₁₀₇ variant of Construct 12.

[0167] FIG. 2R shows an exemplary plasmid for expressing the fusion protein of SEQ ID NO: 60 in E. coli cells. This fusion protein comprises TAT28 and the full-length human CDKL5₁₀₇ isoform.

[0168] FIG. 2S shows an exemplary plasmid for expressing the fusion protein of SEQ ID NO: 61 in E. coli cells. This fusion protein comprises TATκ28 and enhanced Green Fluorescent Protein (eGFP).

[0169] FIG. 2T shows an exemplary plasmid for expressing the fusion protein of SEQ ID NO: 62 in E. coli cells. This fusion protein comprises eGFP without a CPP.

[0170] FIG. 2U shows an exemplary plasmid for expressing the fusion protein of SEQ ID NO: 63 in E. coli cells. This fusion protein comprises human Amphiphysin1 (AMPH1).

[0171] FIG. 2V shows an exemplary plasmid for expressing the fusion protein of SEQ ID NO: 64 in CHO cells. This fusion protein comprises human Amphiphysin1 (AMPH1).

[0172] FIG. 2W shows an exemplary plasmid for expressing the fusion protein of SEQ ID NO: 65 in CHO cells. This fusion protein comprises the modified BiP leader signal polypeptide, TATκ11 and the full-length human CDKL5₁₀₇ isoform.

[0173] FIG. 2X shows an exemplary plasmid for expressing the fusion protein of SEQ ID NO: 66 in CHO cells. This fusion protein comprises the murine Igκ chain leader polypeptide, TATκ11 and the full-length human CDKL5₁₀₇ isoform.

[0174] FIG. 2Y shows an exemplary plasmid for expressing the fusion protein of SEQ ID NO: 67 in CHO cells. This fusion protein comprises TATκ11 and the full-length human CDKL5₁₀₇ isoform without a leader signal polypeptide.

[0175] FIG. 2Z shows an exemplary plasmid for expressing the fusion protein of SEQ ID NO: 68 in E. coli cells. This fusion protein comprises TATκ11 and the full-length human CDKL5₁₀₇ isoform without a leader signal polypeptide.

[0176] FIG. 2AA shows an exemplary plasmid for expressing the fusion protein of SEQ ID NO: 69 in E. coli cells. This fusion protein comprises TAT11 and the full-length human CDKL5₁₀₇ isoform without a leader signal polypeptide.

[0177] FIG. 2AB shows an exemplary plasmid for expressing the fusion protein of SEQ ID NO: 70 in CHO cells. This fusion protein comprises TAT11 and the full-length human CDKL5₁₀₇ isoform without a leader signal polypeptide.

[0178] FIG. 2AC shows an exemplary plasmid for expressing the fusion protein of SEQ ID NO: 71 in CHO cells. This fusion protein comprises the Antennapedia CPP and the full-length human CDKL5₁₀₇ isoform without a leader signal polypeptide.

[0179] FIG. 2AD shows an exemplary plasmid for expressing the fusion protein of SEQ ID NO: 72 in CHO cells. This fusion protein comprises the Transportan CPP and the full-length human CDKL5₁₀₇ isoform without a leader signal polypeptide.

[0180] FIG. 2AE shows an exemplary plasmid for expressing the fusion protein of SEQ ID NO: 73 in CHO cells. This fusion protein comprises TAT28 and the full-length human CDKL5₁₀₇ isoform without a leader signal polypeptide.

[0181] FIG. 2AF shows an exemplary plasmid for expressing the fusion protein of SEQ ID NO: 74 in CHO cells. This fusion protein comprises the modified BiP leader signal polypeptide, the P97 CPP and the full-length human CDKL5₁₀₇ isoform.

[0182] FIG. 2AG shows an exemplary plasmid for expressing the fusion protein of SEQ ID NO: 75 in human cells. This fusion protein comprises the P97 CPP and the full-length human CDKL5₁₀₇ isoform without a leader signal polypeptide.

[0183] FIG. 2AH shows an exemplary plasmid for expressing the fusion protein of SEQ ID NO: 76 in human cells. This fusion protein comprises TATκ28 and the full-length human CDKL5₁₀₇ isoform without a leader signal polypeptide.

[0184] FIG. 2AI shows an exemplary plasmid for expressing the fusion protein of SEQ ID NO: 77 in human cells. This fusion protein comprises TATκ11 and the full-length human CDKL5₁₀₇ isoform without a leader signal polypeptide.

[0185] FIG. 2AJ shows an exemplary plasmid for expressing the fusion protein of SEQ ID NO: 78 in human cells. This fusion protein comprises TAT28 and the full-length human CDKL5₁₀₇ isoform without a leader signal polypeptide.

[0186] FIG. 2AK shows an exemplary plasmid for expressing the fusion protein of SEQ ID NO: 79 in human cells. This fusion protein comprises TAT11 and the full-length human CDKL5₁₀₇ isoform without a leader signal polypeptide.

[0187] FIG. 2AL shows an exemplary plasmid for expressing the fusion protein of SEQ ID NO: 80 in human cells. This fusion protein comprises the Antennapedia CPP and the full-length human CDKL5₁₀₇ isoform without a leader signal polypeptide.

[0188] FIG. 2AM shows an exemplary plasmid for expressing the fusion protein of SEQ ID NO: 81 in human cells. This fusion protein comprises the Transportan CPP and the full-length human CDKL5₁₀₇ isoform without a leader signal polypeptide.

[0189] FIG. 2AN shows an exemplary plasmid for expressing the fusion protein of SEQ ID NO: 82 in human cells. This fusion protein comprises the modified BiP leader signal polypeptide, TATκ28 and the full-length human CDKL5₁₁₅ isoform.

[0190] FIG. 2AO shows an exemplary plasmid for expressing the fusion protein of SEQ ID NO: 83 in insect cells. This fusion protein comprises TATκ28 and the full-length human CDKL5₁₀₇ isoform without a leader signal polypeptide.

[0191] FIG. 2AP shows an exemplary plasmid for expressing the fusion protein of

[0192] SEQ ID NO: 84 in insect cells. This fusion protein comprises TATκ11 and the full-length human CDKL5₁₀₇ isoform without a leader signal polypeptide.

[0193] FIG. 2AQ shows an exemplary plasmid for expressing the fusion protein of SEQ ID NO: 85 in insect cells. This fusion protein comprises TAT28 and the full-length human CDKL5₁₀₇ isoform without a leader signal polypeptide.

[0194] FIG. 2AR shows an exemplary plasmid for expressing the fusion protein of SEQ ID NO: 86 in insect cells. This fusion protein comprises TAT11 and the full-length human CDKL5₁₀₇ isoform without a leader signal polypeptide.

[0195] FIG. 2AS shows an exemplary plasmid for expressing the fusion protein of SEQ ID NO: 87 in insect cells. This fusion protein comprises the Antennapedia CPP and the full-length human CDKL5₁₀₇ isoform without a leader signal polypeptide.

[0196] FIG. 2AT shows an exemplary plasmid for expressing the fusion protein of SEQ ID NO: 88 in insect cells. This fusion protein comprises the Transportan CPP and the full-length human CDKL5₁₀₇ isoform without a leader signal polypeptide.

[0197] FIG. 2AU shows an exemplary plasmid for expressing the fusion protein of SEQ ID NO: 89 in insect cells. This fusion protein comprises the P97 CPP and the full-length human CDKL5₁₀₇ isoform without a leader signal polypeptide.

[0198] FIG. 2AV shows an exemplary plasmid for expressing the fusion protein of SEQ ID NO: 90 in insect cells. This fusion protein comprises eGFP without a CPP.

[0199] FIG. 2AW shows an exemplary plasmid for expressing the fusion protein of SEQ ID NO: 91 in insect cells. This fusion protein comprises TATκ28 and eGFP.

[0200] FIG. 2AX shows an exemplary plasmid for expressing the fusion protein of SEQ ID NO: 92 in insect cells. This fusion protein comprises the full-length human CDKL5₁₀₇ isoform without a leader signal polypeptide or CPP.

[0201] FIG. 2AY shows an exemplary plasmid for expressing the fusion protein of SEQ ID NO: 93 in CHO cells. This fusion protein comprises the modified BiP leader signal polypeptide, TATκ28 and the 1-7NQ CDKL5₁₀₇ glycosylation variant.

[0202] FIG. 2AZ shows an exemplary plasmid for expressing the fusion protein of SEQ ID NO: 94 in CHO cells. This fusion protein comprises the modified BiP leader signal polypeptide, TATκ28 and the 2-7NQ CDKL5₁₀₇ glycosylation variant.

[0203] FIG. 2BA shows an exemplary plasmid for expressing the fusion protein of SEQ ID NO: 95 in CHO cells. This fusion protein comprises the modified BiP leader signal polypeptide, TATκ28 and the 1,3-7NQ CDKL5₁₀₇ glycosylation variant.

[0204] FIG. 2BB shows an exemplary plasmid for expressing the fusion protein of SEQ ID NO: 96 in CHO cells. This fusion protein comprises the modified BiP leader signal polypeptide, TATκ28 and the 1-2,4-7NQ CDKL5₁₀₇ glycosylation variant.

[0205] FIG. 2BC shows an exemplary plasmid for expressing the fusion protein of SEQ ID NO: 97 in CHO cells. This fusion protein comprises the modified BiP leader signal polypeptide, TATκ28 and the 1-3,5-7NQ CDKL5₁₀₇ glycosylation variant.

[0206] FIG. 2BD shows an exemplary plasmid for expressing the fusion protein of SEQ ID NO: 98 in CHO cells. This fusion protein comprises the modified BiP leader signal polypeptide, TATκ28 and the 1-4,6-7NQ CDKL5₁₀₇ glycosylation variant.

[0207] FIG. 2BE shows an exemplary plasmid for expressing the fusion protein of SEQ ID NO: 99 in CHO cells. This fusion protein comprises the modified BiP leader signal polypeptide, TATκ28 and the 1-5,7NQ CDKL5₁₀₇ glycosylation variant.

[0208] FIG. 2BF shows an exemplary plasmid for expressing the fusion protein of SEQ ID NO: 100 in CHO cells. This fusion protein comprises the modified BiP leader signal polypeptide, TATκ28 and the 1-6NQ CDKL5₁₀₇ glycosylation variant.

[0209] FIG. 2BG shows an exemplary plasmid for expressing the fusion protein of SEQ ID NO: 101 in CHO cells. This fusion protein comprises the modified BiP leader signal polypeptide, TATκ28 and the 2NQ CDKL5₁₀₇ glycosylation variant.

[0210] FIG. 2BH shows an exemplary plasmid for expressing the fusion protein of SEQ ID NO: 102 in CHO cells. This fusion protein comprises the modified BiP leader signal polypeptide, TATκ28 and the 1-10NQ CDKL5₁₀₇ glycosylation variant.

[0211] FIG. 2BI shows an exemplary plasmid for expressing the fusion protein of SEQ ID NO: 103 in CHO cells. This fusion protein comprises the modified BiP leader signal polypeptide, TATκ28 and the 1-7,9-10NQ CDKL5₁₀₇ glycosylation variant.

[0212] FIG. 2BJ shows an exemplary plasmid for expressing the fusion protein of SEQ ID NO: 104 in CHO cells. This fusion protein comprises the modified BiP leader signal polypeptide, TATκ28 and the 1-8,10NQ CDKL5₁₀₇ glycosylation variant.

[0213] FIG. 2BK shows an exemplary plasmid for expressing the fusion protein of SEQ ID NO: 105 in CHO cells. This fusion protein comprises the modified BiP leader signal polypeptide, TATκ28 and the 1-9NQ CDKL5₁₀₇ glycosylation variant.

[0214] Various CDKL5 fusion proteins were expressed in E. coli, CHO, HEK and insect cells, as well as using in vitro transcription/translation with HeLa cell lysates, as further described below.

### Example 1—Expression of CDKL5 Truncation Variants in E. Coll Cells

[0215] Full-length and truncations of TATκ28-CDKL5_107-FH were cloned into the pET vector, pEX-1, and transformed into the E. coli strain, BL21(DE3). Colony-purified transformants were cultured in LB+100 μg/mL ampicillin at 37° C. to exponential phase. The cultures were then cooled to 20° C. and induced with (or without) 1 mM IPTG for 16 hours. Cell pellets were collected and lysed in B-Per Complete Bacterial Protein Extraction Solution (Thermo) supplemented with 1X Complete Protease Inhibitor Complex (Roche). Lysis was allowed to proceed for 30 minutes at room temperature. A soluble fraction was prepared from the lysate by centrifugation at 16,000×g for 15 minutes at 4° C. Proteins were resolved on SDS-PAGE, transferred to nitrocellulose membranes, probed with a rabbit anti-polyhistidine antibody (Thermo), and detected with a fluorescent secondary antibody.

[0216] Blots shown FIGS. 3A and 3B confirmed expression of the CDKL5 truncation variants. In FIGS. 3A and 3B, the cultures without IPTG induction are the odd-numbered lanes and the cultures with IPTG induction are the even-numbered lanes, with no CDKL5 fusion protein being expressed in the lanes without IPTG induction and the CDKL5 fusion proteins being expressed in the lanes with IPTG induction.

[0217] For FIG. 3A, the lane identification is as follows:

TABLE 2
Lane Identification for Figure 3A

| | Sample | AA size | |
|---|---|---|---|
| # | Name | (difference) | Lane |
| 1 | pEX-1 empty | | 1, 2 |
| 2 | Tκ28p_107 | 1038 | 3, 4 |
| 3 | TT28p_107 | 1038 | 5, 6 |
| 4 | Δ853-960 | −108 | 7, 8 |
| 5 | Δ745-960 | −216 | 9, 10 |
| 6 | Δ637-960 | −324 | 11, 12 |

[0218] For FIG. 3B, the lane identification is as follows:

TABLE 3
Lane Identification for Figure 3B

| # | Sample Name | AA size (difference) | Lane |
|---|---|---|---|
| 7 | Δ529-960 | −432 | 1, 2 |
| 8 | Δ421-960 | −540 | 3, 4 |
| 9 | Δ315-960 | −646 | 5, 6 |
| 10 | Δ315-420 | −106 | 7, 8 |
| 11 | Δ315-528 | −214 | 9, 10 |
| 12 | Δ315-636 | −322 | 11, 12 |

### Example 2—Expression of CDKL5 Fusion Proteins in CHO Cells

[0219] CHO-S cells (20×10\hat{ }6cells) were electroporated using Maxcyte STX with 8 plasmids: (1) pOptiVec empty vector; 2) TATκ28-CDKL5-107-3×FlagHis; 3) TATκ11-CDKL5-107-3×FlagHis; 4) TAT11-CDKL5-107-3×FlagHis; 5) TAT28-CDKL5-107-3×FlagHis; 6) ANTP-CDKL5-107-3×FlagHis; 7) TRANSP-CDKL5-107-3×FlagHis and 8) MBiP-TATκ28-CDKL5-107-3×FlagHis (coding sequences being CHO codon-optimized). Cells were recovered in culture medium, and cultured for one day. Cells were harvested and lysed. For each transfection, 20 μg lysate was subjected to 4-12% BisTris SDS-PAGE, and transferred to nitrocellulose blot using the iBlot2 system. The blot was blocked in 5% milk in 1×TBS-T. Blot was subjected to Western blot by incubating with 1:2000 dilution of rabbit anti-His antibody overnight. After a series of washes, blot was incubated with 1:10000 anti-rabbit IgG DyaLight 680 secondary antibody. Additional washes were performed. Blot was imaged on Licor Odyssey scanner. Blot shown in FIG. 4A confirmed expression of the CDKL5 fusion proteins.

### Example 3—Expression of CDKL5 Fusion Proteins in HEK Cells

[0220] HEK293F cells (8×10\hat{ }cells) were transfected with FuGeneHD (240 FuGeneHD: 8 μg DNA ratio) and 7 plasmids: 1) empty pOptiVec; 2) TATκ11-CDKL5_107-3×FlagHis; 3) TAT11-CDKL5_107-3×FlagHis; 4) TAT28-CDKL5_107-3×FlagHis; 5) ANTP-CDKL5_107-3×FlagHis; 6) TRANSP-CDKL5_107-3×FlagHis and 7) TATκ28-CDKL5_107-3×FlagHis (coding sequences being human codon-optimized). Cells were incubated and harvested 2 days post transfection. Cells were lysed, and 20 μg lysate was subjected to 4-12% BisTris SDS-PAGE, and transferred to nitrocellulose blot using the iBlot2 system. The blot was blocked in 5% milk in 1×TBS-T. Blot was subjected to Western blot by incubating with 1:2000 dilution of rabbit anti-His antibody overnight. After a series of washes, blot was incubated with 1:10000 anti-rabbit IgG DyaLight 680 secondary antibody. Additional washes were performed. Blot was imaged on Licor Odyssey scanner. Blot shown in FIG. 4B confirmed expression of the CDKL5 fusion proteins.

### Example 4—Methotrexate Amplification of CDKL5 Fusion Proteins in CHO Cells

[0221] Methotrexate amplification was used to amplify expression of CDKL5 fusion proteins in CHO-DG44 cells. TATκ28-CDKL5_107-FH (no signal sequence), Igκ-TATκ28-CDKL5_107-FH, and mBiP-TATκ28-CDKL5_107-FH were cloned into the pOptiVec vector providing the DHFR gene for methotrexate resistance. These plasmids were transfected into DG44 cells (deficient in dhfr) and selected by growth in medium deficient in hypoxanthine and thymidine. Methotrexate-resistant subcultures were obtained by culturing the cells sequentially in 0.1, 0.25, 0.5, and 1 μM Methotrexate (MTX), allowing cells to recover to 70% viability between steps. Cell pellets were lysed in 50 mM Tris-HCl with 75 mM NaCl, 1% Triton X-100, and 1.5X protease inhibitor cocktail (EDTA-free), pH 7.4. 40 μg of total protein were resolved on LDS-PAGE, transferred to nitrocellulose membranes, probed with a rabbit anti-polyhistidine antibody (Thermo), and detected with a fluorescent secondary antibody.

[0222] The blot shown in FIG. 5 demonstrates that as the methotrexate concentration was increased to select higher copy number variants of DHFR:CDKL5, evidence of genetic rearrangement appeared except for the mBiP construct, and only the mBiP version had increased levels of CDKL5. This pattern was replicated with both the 107 kDa (CDKL5_107) and 115 kDa (CDKL5_115) versions of CDKL5. Moreover, only with the mBiP construct was a slightly larger form of CDKL5 apparent. Without wishing to be bound by any particular theory, it is believed that the cytosolic expression of TATκ28-CDKL5 is either toxic to cells or reduces cell proliferation. Only those cells that rearranged the CDKL5 sequence, eliminating its expression, can be selected with high levels of methotrexate when a signal sequence is absent or the Igκ sequence is used. The higher mass form resulting from the mBiP signal sequence is consistent with the addition of N-linked glycans in the secretory pathway, and the lack of this larger form with the Igκ signal sequence suggests lower efficiency of translocation.

### Example 5—Comparison of CDKL5 Expression Secreted into the Medium and in Cell Lysates

[0223] In addition to the DG44 transfected cell lines noted above (TATκ28-CDKL5_107-FH without a signal sequence, Igκ-TATκ28-CDKL5_107-FH, and mBiP-TATκ28-CDKL5_107-FH), an Igκ-TATκ28-eGFP-CDKL5_107-MH plasmid stably transfected in adherent HEK293T cells were compared for secretion of CDKL5 fusion protein into the culture medium and in the cell lysates. The mBiP-TATκ28-CDKL5_107-FH cell line was represented by both 0 mM MTX and 0.5 μM MTX sub-cultures. After two days in serum-free growth, the conditioned medium was collected and concentrated 200-fold.

[0224] Cell pellets were lysed in 50 mM Tris-HCl with 75 mM NaCl, 1% Triton X-100, and 1.5X protease inhibitor cocktail (EDTA-free), pH 7.4. Cell lysates or concentrated conditioned medium were resolved on LDS-PAGE, transferred to nitrocellulose membranes, probed with a rabbit anti-polyhistidine antibody (Thermo), and detected with a fluorescent secondary antibody.

[0225] Blots shown in FIGS. 6A and 6B compare both the secreted and internal stores of CDKL5 among the various signal sequence constructs, respectively. The methotrexate amplified subculture is designated by the asterisk—Bip-TATκ-CDKL5*. Methotrexate amplified mBiP construct greatly increased the level of expressed CDKL5, and most of the protein was trapped inside the cells. The TATκ28-eGFP-CDKL5 construct only provided a secreted quantity of CDKL5 fusion protein of about 0.1 μg/L, while the mBiP-TATκ28-CDKL5 construct achieved a secreted quantity of CDKL5 fusion protein of about 15 μg/L (a 150-fold increase). Inside the same mBiP-TATκ28-CDKL5 expressing cells, the CDKL5 fusion proteins represented 0.1% (1 mg/g) of total protein.

### Example 6—Co-Expression of CDKL5 Fusion Proteins and Potential Substrates

[0226] A single plasmid (pCHO 1.0) harboring both TATκ28-CDKL5-FH (no signal sequence) and one of several putative CDKL5 substrates (HOMER1, HDAC4, ARHGEF2, MAPRE2, AMPH1, or SHANK1), or no protein partner, were transiently transfected into HEK293F cells. After five days in culture, cells were harvested and lysed in 50 mM sodium phosphate, 150 mM sodium chloride, 0.5% Triton-X100, 1X Complete Protease Inhibitor Complex, EDTA-free, pH 7 for 30 minutes at 4° C. A soluble fraction was obtained by centrifugation of the lysates at 16,000×g for 15 minutes at 4° C. Soluble protein was determined by BCA assay and an equal quantity was resolved on SDS-PAGE, transferred to nitrocellulose membranes, probed with rabbit anti-polyhistidine (ThermoFisher) and mouse anti-CDKL5 antibodies (EMD Millipore), and detected with near-infrared fluorescent secondary antibodies, anti-rabbit IgG DyaLight 680 and anti-mouse IgG DyaLight 800 (Cell Signaling Technology). As shown in the blot of FIG. 7, the co-expression of AMPH1 increased the quantity of soluble TATκ28-CDKL5 while the co-expression of ARHGEF2 reduced the quantity of soluble TATκ28-CDKL5. The latter suggests that elimination of ARHGEF2 expression might increase the quantity of soluble TATκ28-CDKL5.

### Example 7—In Vitro Transcription/Translation of CDKL5 Proteins

[0227] The following proteins were cloned into a T7/EMCV-IRES plasmid (pT7CFE1): eGFP, CDKL5_115 and TAT28-CDKL5_107-FH. Purified plasmid DNA was introduced into a HeLa cell-based IVT kit (Thermo) for non-CAP dependent combined in vitro transcription/translation for 5 hours at 30° C. Protein samples were resolved on SDS-PAGE, transferred to nitrocellulose membranes, probed with a rabbit anti-polyhistidine (His) antibody (Thermo), and detected with a fluorescent secondary antibody. Blot shown in FIG. 8 confirmed expression of the CDKL5 fusion proteins.

### Example 8—Glycosylation of CDKL5 Proteins

[0228] Further analysis of MBiP-TATκ28-CDKL5-107-3×FlagHis revealed that this fusion protein was glycosylated when expressed in CHO-DG44 and HEK293F cells. Plasmids were transiently transfected by electroporation into CHO-DG44 and HEK293F cells. Cell pellets were lysed and a soluble fraction was obtained by centrifugation. The soluble fraction was denatured in PNGase F buffer and incubated with PNGase F to remove N-linked glycans. Digested samples were resolved by SDS-PAGE, transferred to nitrocellulose and immunoblotted with an anti-polyhistidine antibody. Blot shown in FIG. 4A demonstrates that the fusion protein comprising the wild-type CDKL5₁₀₇ isoform is highly glycosylated when expressed in CHO-DG44 cells prior to treatment with PNGase F, whereas substituting 7 of the Asn residues of the N-linked glycosylation sites with Gln (1-7NQ) produces a fusion protein with little to no glycosylation when expressed in the CHO-DG44 cells. Further fusion proteins comprising the CDKL5 glycosylation variants 1-4, 6-7NQ; 1-5, 7NQ; 1-6NQ; 2NQ; 2-7NQ; 1, 3-7NQ; 1-2, 4-7NQ and 1-3, 5-7NQ were expressed in HEK293F cells, and untreated or treated with PNGase F and are shown in FIG. 4B. These fusion proteins comprising the other glycosylation variants had varying degrees of glycosylation and were all less glycosylated than the fusion protein comprising the wild-type CDKL5₁₀₇ isoform, thus showing that the various N-linked glycosylation sites can be glycosylated in isolation. Fusion proteins comprising the wild-type CDKL5₁₁₅ isoform were also found to be glycosylated.

### Example 9—Expression of CDKL5 Fusion Proteins in Insect Cells

[0229] Other expression systems were also investigated to improve expression, reduce glycosylation and/or enhance purification. One such system utilized the insect cells Sf9. To protect the N-terminus of TATκ28-CDKL5 and other CDKL5 fusion proteins, a GST tag was genetically fused to the N-terminus, separated from the remaining portion of the CDKL5 fusion protein by an HRV3C protease site. Another HRV3C protease site was added to the C-terminus of the CDKL5 protein to separate the FLAG and polyhistidine (His) affinity tags. Sf9 cells were co-transfected with linearized baculovirus (BV) DNA and transfer plasmids: 1) GST-P-TATκ28-eGFP-P-FH; 2) GST-P-eGFP-P-FH; 3) GST-P-TAT28-CDKL5_107-P-FH; 4) GST-P-TATκ28-CDKL5_107-P-FH; 5) GST-P-p97p-CDKL5_107-P-FH; 6) GST-P-Antp-CDKL5_107-P-FH; 7) GST-P-TAT11-CDKL5_107-P-FH and GST-P-Transp-CDKL5_107-P-FH (coding sequences being Sf9 codon-optimized). 1 μg protein run out on duplicate 4-12%, 10-well NuPage gels. Gels run at 175V for 90 minutes. Protein transferred to nitrocellulose using the iBLOT at 20v for 7 minutes. Expression of CDKL5 fusion proteins was analyzed with Sypro Ruby Red total protein stain as shown in FIG. 5.

### Example 10—Purification and Cleavage of GST-P-TATκ28-CDKL5Proteins

[0230] CDKL5 fusion proteins from insect cells were also purified to isolate the CDKL5 proteins from the cell lysate. GST-P-TATκ28-CDKL5_107-P-FH proteins were expressed in High Five (BTI-Tn-5B1-4) cells maintained as suspension cultures in Sf90011 media. Infected cell pellets were lysed with 50 mM NaPO₄, 500 mM NaCl, 10% Glycerol, pH 6) supplemented with 1X HALT Protease Inhibitor cocktail without EDTA (Thermo, 78437), 1 mM tris 2-carboxyethyl-phosphine (TCEP) and 5 mM EDTA at a ratio of 10 ml Lysis Buffer per 100 million cells. Following lysis by nitrogen cavitation using the Parr 4639 Cell Cracker at 750PSI for 15 minutes, Triton X-100 was added to 0.5%. The lysate was clarified by centrifugation at 31,000×g for 20 minutes. The soluble material was adjusted to 350 mM NaCl and applied to HiTrap SP Fast Flow resin (GE Healthcare, 17-5157-01). Bound protein was eluted with a 10 column volume (CV) NaCl gradient, 350-2000 mM. The CDKL5 protein peak, 525-1225 mM NaCl, was buffer-exchanged in to Buffer B (50 mM NaPO₄, 500 mM NaCl, 10% Glycerol, 1X HALT Protease inhibitor cocktail without EDTA, 1 mM TCEP, pH 8). Protein was applied to IMAC Sepharose 6 FF resin (GE Healthcare, 17-0921-09) that had been charged with Nickel Sulfate and pre-equilibrated with Buffer B. The resin was washed with Buffer B+60 mM imidazole. The resin with incubated with 40 U of HRV3C protease (Millipore, 71493) at 4° C. up to overnight to remove the GST, FLAG and polyhistidine (His) affinity tags. Aliquots of the cleaved material examined at 3 hours and overnight. The resin was washed with 50 mM NaPO4, 500 mM NaCl, 10% Glycerol, 1 mM TCEP+1X HALT PI-EDTA+0.5% Triton X-100+500 mM imidazole to elute the CDKL5. The eluted protein lacks the affinity tags and migrates more quickly though SDS-PAGE.

[0231] FIGS. 10A and 10B show a Sypro Ruby Red total protein stained gel analysis. FIG. 11A shows the expression of GST-P-TATκ28-CDKL5_107-P-FH in insect cells compared to uninfected control cells and the recovery of tagged protein on the IMAC resin. FIG. 11B shows the tagged CDKL5 protein prior to and post-cleavage with the eluted protein from the IMAC resin. Similarly, FIG. 12A shows a Sypro Ruby Red stained gel of a CDKL5 fusion protein in cell lysate and the purified fusion protein. FIG. 12B shows a Sypro Ruby Red stained gel demonstrating HRV3C protease cleavage of the CDKL5 fusion protein of FIG. 11A

### Example 11—Solubility of CDKL5 Proteins in Salt Solutions

[0232] GST-P-TATκ28-CDKL5_107-P-FH expressed in HighFive cells via infection with baculovirus was released from cells by lysis in 50 mM Na-phosphate, 500 mM NaCl, 10% glycerol, 1 mM TCEP, 1 mM EDTA, 1×HALT protease inhibitor cocktail, pH 6.0, using nitrogen cavitation for 15 minutes at room temperature. Following cell disruption, Triton X-100 was added to 0.5%, and incubated for 30 minutes at 4° C. The lysate was separated into soluble and insoluble fractions by centrifugation at 15,000×g for 15 minutes at room temperature. The soluble fraction was then further modified with the following conditions by dilution to the same final volume:
[0233] Maintained at 500 mM NaCl
[0234] Lowered to 350 mM NaCl
[0235] Lowered to 250 mM NaCl
[0236] (A) Supplemented with 2% Polysorbate-80, and lowered to 350 mM NaCl
[0237] (B) Supplemented with 50 mM arginine/50 mM glutamine, and lowered to 350 mM NaCl
[0238] (C) Supplemented with 100 mM betaine, and lowered to 350 mM NaCl
[0239] (D) Supplemented with 100 mM glycine, and lowered to 350 mM NaCl

[0240] Following incubation for 1 hour at room temperature under the described conditions, the solutions were again separated into soluble and insoluble fractions by centrifugation. The insoluble fraction was re-suspended in a volume equal to the soluble fraction, and both soluble and insoluble fractions were resolved on LDS-PAGE, then detected by staining with Coomassie.

[0241] FIG. 13 shows that the CDKL5 fusion protein is soluble at high salt concentrations (e.g., at least 500 mM NaCl) and NaCl levels lower than 500 mM result in insoluble CDKL5 protein. The CDKL5 protein can be briefly exposed to NaCl concentrations as low at 350 mM, but some loss in incurred. For this reason, most purification steps described herein are carried out in high salt levels, but such high salt levels may be incompatible with in vivo administration.

### Example 12—Purification and Cleavage of TwinStrep-HRV3C-TATκ28-CDKL5-HRV3C-FLAG-His-HPC4 Proteins

[0242] In this Example, the fusion protein TwinStrep-HRV3C-TATκ28-CDKL5-HRV3C-FLAG-His-HPC4 was expressed and purified. FIG. 14A shows the schematics of the fusion protein. The fusion protein has an amino acid sequence according to SEQ ID NO: 174. Similarly, the fusion protein has a nucleotide sequence according to SEQ ID NO: 175. FIG. 14B shows the fusion protein expression, purification, on column digestion by HRV3C protease and recovered fusion protein. FIG. 15 shows a Western blot analysis of the purification process. In FIG. 15A, the Western blot analysis was performed with anti-strep antibody and the results indicate complete digestion at the N-terminus. In contrast, the FIG. 15B shows a Western blot analysis using anti-HPC4 antibody indicating incomplete digestion at the C-terminus. FIG. 16 shows IMAC/Ni resin purification of the fusion protein and His-HRV3C protease.

### Example 13—Purification and Cleavage of TwinStrep-HRV3C-TATκ28-CDKL5-HRV3C-FLAG-His-TwinStrep Proteins

[0243] CDKL5 fusion proteins from insect cells were purified to isolate the CDKL5 proteins from the cell lysate.

[0244] In this Example, the fusion protein was TwinStrep-HRV3C-TATκ28-CDKL5-HRV3C-FLAG-His-TwinStrep protein. The fusion protein has an amino acid sequence according the SEQ ID No: 176. Similarly, the fusion protein has a nucleotide sequence according SEQ ID No: 177. FIG. 17 shows the schematics of the fusion protein. The fusion protein was expressed in High Five (BTI-Tn-5B1-4) cells. Infected cells were pelleted and stored at −80° C.

[0245] For lysis, the cell pellet was resuspended in a lysis buffer (50 mM Tris HCl, 500 mM NaCl, 10% Glycerol, 1 mM EDTA at pH 8) supplemented with 1X HALT Protease Inhibitor cocktail without EDTA (Thermo, 78437). Following lysis by nitrogen cavitation using the Parr 4639 Cell Cracker at 750PSI for 15 minutes, Triton X-100 was added to 0.5%. The lysate was clarified by centrifugation at 31,000×g for 20 minutes. The clarified lysate was collected into a soluble fraction.

[0246] The insoluble pellet was washed with the lysis buffer. The washed insoluble pellet was then resuspended in 2 ml of the lysis buffer and sonicated. The soluble fraction after sonication was used for protein analysis. BCA assay was used to measure the protein concentration. NuPAGE was used to analyze the protein expression in insect cells. In FIG. 18, start and load shows total cellular protein and soluble fraction respectively.

[0247] For purifying the fusion protein from other soluble proteins, Strep-Tectin resin was used. The soluble fraction was loaded on a pre-equilibrated Strep-Tectin column. The affinity-tags were cleaved off on Strep-Tectin column using His-HRV3C protease. For the cleavage, the fusion protein bound to Strep-Tectin was incubated with the His-HRV3C protease for about 1 hour. After the digestion, the flow through and wash were collected. In FIG. 18, Wash-2 shows digested fusion protein. The digestion process was repeated one more time. In FIG. 18, Wash-3 shows the repeated digested fusion protein. The flow through and was were collected from the repeated digestion process. The flow-throughs and washes were pooled together in a cleavage pool. In FIG. 18, Desthiobiotin eluted fractions shows no undigested fusion protein. An analysis of imperial blue stained gel in FIG. 18A and a Western blot analysis using anti-strep antibody of FIG. 18B indicates complete digestion of the fusion protein at at N-terminus and C-terminus.

[0248] For a buffer exchange of the digested fusion protein and the His-HRV3C protease, HiPrep 26/20 Desalting column (Cytiva 17-5087-01) was used. The column was pre-equilibrated with Buffer A (50 mM Bis-Tris, 350 mM NaCl, 10% (v/v) glycerol at pH 6). The fusion protein containing the His-HRV3C protease was loaded on the column and fractions were pooled together into a desalting pool.

[0249] For purifying the fusion protein from the His-HRV3C protease, SP Sepharose capture column was used. The desalting pool was applied to an SP Sepharose capture, which was pre-equilibrated with the Buffer A. The TATκ28-CDKL5 protein was eluted with 55% of Buffer A and 45% of Buffer B (50 mM Bis-Tris, 2000 mM NaCl, 10% (v/v) glycerol at pH 6) to remove His-HVRc3 from the purified TATκ28-CDKL5 protein fraction. FIG. 19 shows purification process using SP Sepharose capture column.

### Example 14—Uptake of Purified TATκ28-CDKL5 Proteins in DIV14 Embryonic Primary Cortical Neurons

[0250] In this Example, an uptake of CDKL5 fusion proteins in embryonic primary cortical neurons was determined. The embryonic primary cortical neurons were isolated from healthy rat embryos at E15. The embryonic primary cortical neurons were seeded on poly-1-lysine coated glass coverslips and maintained for 14 days in vitro (DIV14). Recombinant TATκ28-CDKL5 was purified from a baculoviral/insect cell expression system via affinity-tag chromatography. The affinity-tags were removed by protease cleavage and the full-length protein was further isolated and concentrated via cation exchange chromatography. Cultured embryonic primary cortical neurons were treated with 10 μg/ml recombinant TATκ28-CDKL5 for 6 hours. Non-treated cultured embryonic primary cortical neurons were used as a negative control. Each sample, either treated or non-treated, were fixed in 4% PFA, permeabilized in 0.1% saponin, and stained using anti-MAP2, anti-CDKL5, and/or anti-phosphorylated (S222) EB2 antibodies. The cells were counterstained with DAPI and mounted on glass microscope slides under Prolong Diamond anti-fade mounting medium. The samples were imaged using a Leica SP8 point scanning laser confocal microscope with a 63x oil-immersion objective. The images were processed using Leica Lightning software and merged and colorized using ImageJ software. Analysis of phospho (S222) EB2 signal was performed using ImageJ software and graphed with GraphPad Prism software. FIG. 20A-20F shows the uptake of TATκ28-CDKL5 in DIV14 embryonic primary cortical neurons. FIG. 20A-20C shows images for negative controls treated with an equivalent volume of saline. FIG. 20A shows images of rat DIV14 embryonic primary cortical neurons stained with anti-DAPI and anti-MAP2 under the fluorescence microscope. FIG. 20B is an enlarged section of FIG. 20A. FIG. 20C shows FIG. 20B but only for anti-CDKL5 protein fluorescence. FIG. 20D-20F shows results of the uptake experiment, where the cells were treated with TATκ28-CDKL5. FIG. 20D shows image of rat DIV14 embryonic primary cortical neurons stained with anti-DAPI and anti-MAP2 under the fluorescence microscope. FIG. 20E is an enlarged section of FIG. 20D. FIG. 20F shows FIG. 20E but only for anti-CDKL5 fluorescence.

[0251] Similar experiments were also performed in rat DIV7 embryonic primary cortical neurons to compare the results with rat DIV14 embryonic primary cortical neurons.

[0252] FIG. 21A-21F shows the uptake of TATκ28-CDKL5 in rat DIV7 embryonic primary cortical neurons. FIG. 21A-21C are negative controls treated with an equivalent volume of saline. FIG. 21A shows image of rat DIV7 embryonic primary cortical neurons stained with anti-DAPI, anti-MAP2 and anti-CDKL5 protein under the fluorescence microscope. FIG. 21B is an enlarged section of FIG. 21A. FIG. 21C shows FIG. 21B but only for DAPI and anti-CDKL5 protein fluorescence. FIG. 21D-21F shows results of the uptake experiment, where the cells were treated with TATκ28-CDKL5. FIG. 21D shows image of rat DIV7 embryonic primary cortical neurons stained with anti-DAPI, anti-MAP2 and anti-CDKL5 protein under the fluorescence microscope. FIG. 21E is an enlarged section of FIG. 21D. FIG. 21F shows FIG. 21E but only for DAPI and anti-CDKL5 protein fluorescence.

[0253] Similarly, FIG. 22A-22F shows the uptake of TATκ28-CDKL5 in rat DIV14 embryonic primary cortical neurons. FIG. 22A-22C represent images of negative controls. FIG. 22A shows image of embryonic primary cortical neurons stained with anti-DAPI, anti-MAP2 and anti-CDKL5 protein under the fluorescence microscope, FIG. 22B is an enlarged section of FIG. 22A. FIG. 22C shows FIG. 22B but only for DAPI and anti-CDKL5 protein fluorescence. FIG. 22D-22F shows results of the uptake experiment, where the cells were treated with the TATκ28-CDKL5 protein. FIG. 22D shows image of rat DIV14 embryonic primary cortical neurons stained with anti-DAPI, anti-MAP2 and anti-CDKL5 protein under the fluorescence microscope. FIG. 22E is an enlarged section of FIG. 22D. FIG. 22F shows FIG. 22E but only for DAPI and anti-CDKL5 protein fluorescence.

### Example 15—Time Dependent Uptake of Purified TATκ28-CDKL5 Proteins in DIV14 Embryonic Primary Cortical Neurons

[0254] To further confirm TATκ28-CDKL5 over time, the cultured embryonic primary cortical neurons were treated with 10 μg/ml recombinant TATκ28-CDKL5 for 15 min, 30 min, 2 hr, 6 hr, or 24 hours. At each timepoint, treated coverslips were fixed in 4% PFA, permeabilized in 0.1% saponin, and stained using anti-MAP2, anti-CDKL5, and/or anti-phosphorylated (S222) EB2 antibodies. The cells were counterstained with DAPI and mounted on glass microscope slides under Prolong Diamond anti-fade mounting medium. The samples were imaged using a Leica SP8 point scanning laser confocal microscope with a 63x oil-immersion objective. The images were processed using Leica Lightning software and merged and colorized using ImageJ software. FIG. 23A-23J shows rapid uptake of TATκ28-CDKL5 protein by the cultured embryonic primary cortical neurons. FIG. 23A shows negative control with anti-DAPI, anti-MAP2 and anti-CDKL5. FIG. 23B-23E shows cortical neurons stained with anti-DAPI, anti-MAP2 and anti-CDKL5 at 15, 30, 120 and 360 minutes respectively. FIG. 23F shows FIG. 23A image but filtered for anti-CDKL5. Similarly, FIG. 23G-23J shows FIG. 23B-23E images filtered for anti-CDKL5 respectively. An analysis of FIG. 23A-23J indicates TATκ28-CDKL5 protein accumulation in cortical neurons that increases gradually increase in signal intensity over a period of at least 6 hours. Analysis of phospho (S222) EB2 signal was performed using ImageJ software and graphed with GraphPad Prism software. FIG. 24 observe an increase in intensity of phospho (S222) EB2 signal following uptake, an indication that the TATκ28-CDKL5 is active inside the cell.

[0255] CDKL5 protein is reported to co-localize with PSD95 in neurons. In a particular embodiment, the DIV14 neurons were treated with 15 μg/ml of TATκ28-CDKL5 for 2 hours. The neurons were then stained with anti-PSD95 and anti-CDKL5. FIG. 25A and FIG. 25B shows co-localization of CDKL5 with PSD95 and Synapsin1 respectively.

### Example 16—Lentiviral Delivery of CDKL5 to Rat Neurons

[0256] FIGS. 26A-26E show lentiviral delivery of the following to primary cdk15Δ rat neurons: untreated (13A), mBiP (12B), p97 (13C), TATκ28 (13D) and Antennapedia (13E). Cells were treated with 200 μl CPP-CKDL5 lentiviral supernatant and incubated for 24 hours, with a multiplicity of infection (MOI) of about 0.03. Packaging for the lentiviral delivery was done with the ViraPower™ Lentiviral Packaging Mix, Invitrogen K487500. After transduction, cells were fixed in PFA, permeabilized in saponin, and labeled with Ms anti-Beta III tubulin (red), Shp anti-CKDL5 (green), and DAPI (blue); imaged with 63x oil objective. These images show localization of the CDKL5 fusion protein along the neurite.

### Example 17—Cdkl5 Aav Constructs

[0257] SEQ ID NOS: 106-121 provide exemplary sequences for CDKL5 AAV vectors.

[0258] SEQ ID NO: 106 provides an exemplary sequence for a plasmid for expressing the full-length human CDKL5₁₀₇ isoform using the CBh promoter and the L-ITR and R-ITR of SEQ ID NOS: 27 and 28. The DNA sequence is codon-optimized for expression in mice.

[0259] SEQ ID NO: 107 provides an exemplary sequence for a plasmid for expressing a kinase-dead version of the full-length human CDKL5₁₀₇ isoform using the CBh promoter and the L-ITR and R-ITR of SEQ ID NOS: 27 and 28. The DNA sequence is codon-optimized for expression in mice.

[0260] SEQ ID NO: 108 provides an exemplary sequence for a plasmid for expressing eGFP using the CBh promoter and the L-ITR and R-ITR of SEQ ID NOS: 27 and 28. The DNA sequence is codon-optimized for expression in mice.

[0261] SEQ ID NO: 109 provides an exemplary sequence for a plasmid for expressing a fusion protein comprising NLS and eGFP using the CBh promoter and the L-ITR and R-ITR of SEQ ID NOS: 27 and 28. The DNA sequence is codon-optimized for expression in mice.

[0262] SEQ ID NO: 110 provides an exemplary sequence for a plasmid for expressing a fusion protein comprising a modified BiP leader signal polypeptide, TATκ28 and the full-length human CDKL5₁₀₇ isoform using the CBh promoter and the L-ITR and R-ITR of SEQ ID NOS: 27 and 28. The DNA sequence is codon-optimized for expression in mice.

[0263] SEQ ID NO: 111 provides an exemplary sequence for a plasmid for expressing a fusion protein comprising a modified BiP leader signal polypeptide, TATκ28 and a kinase-dead version of the full-length human CDKL5₁₀₇ isoform using the CBh promoter and the L-ITR and R-ITR of SEQ ID NOS: 27 and 28. The DNA sequence is codon-optimized for expression in mice.

[0264] SEQ ID NO: 112 provides an exemplary sequence for a plasmid for expressing a fusion protein comprising a modified BiP leader signal polypeptide, TATκ28 and eGFP using the CBh promoter and the L-ITR and R-ITR of SEQ ID NOS: 27 and 28. The DNA sequence is codon-optimized for expression in mice.

[0265] SEQ ID NO: 113 provides an exemplary sequence for a plasmid for expressing a fusion protein comprising a modified BiP leader signal polypeptide, TATκ28, NLS and eGFP using the CBh promoter and the L-ITR and R-ITR of SEQ ID NOS: 27 and 28. The DNA sequence is codon-optimized for expression in mice.

[0266] SEQ ID NO: 114 provides an exemplary sequence for a plasmid for expressing the full-length human CDKL5₁₀₇ isoform using the hSyn1 promoter and the L-ITR and R-ITR of SEQ ID NOS: 27 and 28. The DNA sequence is codon-optimized for expression in mice.

[0267] SEQ ID NO: 115 provides an exemplary sequence for a plasmid for expressing a kinase-dead version of the full-length human CDKL5₁₀₇ isoform using the hSyn1 promoter and the L-ITR and R-ITR of SEQ ID NOS: 27 and 28. The DNA sequence is codon-optimized for expression in mice.

[0268] SEQ ID NO: 116 provides an exemplary sequence for a plasmid for expressing eGFP using the hSyn1 promoter and the L-ITR and R-ITR of SEQ ID NOS: 27 and 28. The DNA sequence is codon-optimized for expression in mice.

[0269] SEQ ID NO: 117 provides an exemplary sequence for a plasmid for expressing a fusion protein comprising NLS and eGFP using the hSyn1 promoter and the L-ITR and R-ITR of SEQ ID NOS: 27 and 28. The DNA sequence is codon-optimized for expression in mice.

[0270] SEQ ID NO: 118 provides an exemplary sequence for a plasmid for expressing a fusion protein comprising a modified BiP leader signal polypeptide, TATκ28 and the full-length human CDKL5₁₀₇ isoform using the hSyn1 promoter and the L-ITR and R-ITR of SEQ ID NOS: 27 and 28. The DNA sequence is codon-optimized for expression in mice.

[0271] SEQ ID NO: 119 provides an exemplary sequence for a plasmid for expressing a fusion protein comprising a modified BiP leader signal polypeptide, TATκ28 and a kinase-dead version of the full-length human CDKL5₁₀₇ isoform using the hSyn1 promoter and the L-ITR and R-ITR of SEQ ID NOS: 27 and 28. The DNA sequence is codon-optimized for expression in mice.

[0272] SEQ ID NO: 120 provides an exemplary sequence for a plasmid for expressing a fusion protein comprising a modified BiP leader signal polypeptide, TATκ28 and eGFP using the hSyn1 promoter and the L-ITR and R-ITR of SEQ ID NOS: 27 and 28. The DNA sequence is codon-optimized for expression in mice.

[0273] SEQ ID NO: 121 provides an exemplary sequence for a plasmid for expressing a fusion protein comprising a modified BiP leader signal polypeptide, TATκ28, NLS and eGFP using the hSyn1 promoter and the L-ITR and R-ITR of SEQ ID NOS: 27 and 28. The DNA sequence is codon-optimized for expression in mice.

[0274] Plasmids containing SEQ ID NOS: SEQ ID NOS: 106-121 will be generated and tested in mice. Similar plasmids that are codon-optimized for rats will be tested in mice.

[0275] An exemplary DNA sequence codon-optimized for expression of a fusion protein in a human is provided in SEQ ID NO: 122. The fusion protein encoded by SEQ ID NO: 122 comprises a modified BiP leader signal polypeptide, TATκ28 and the full-length human CDKL5₁₀₇ isoform.

[0276] An exemplary DNA sequence codon-optimized for expression of the full-length human CDKL5₁₀₇ isoform in a human (but without the initiator methionine codon or the stop codon) is provided in SEQ ID NO: 123.

[0277] One skilled in the art can derive exemplary DNA sequences for human expression of the CDKL5 truncation variants described herein by deleting the relevant portions of the DNA sequence for the full-length CDKL5₁₀₇ isoform.

[0278] Exemplary DNA sequences for the glycosylation variant fusion proteins of SEQ ID NOS: 93-105 that are codon-optimized for human expression are provided in SEQ ID NOS: 124, 126, 128, 130, 132, 134, 136, 138, 140, 142, 144, 146 and 148, respectively.

[0279] Exemplary DNA sequences for the glycosylation variant CDKL5 polypeptides of SEQ ID NOS: 13-25 that are codon-optimized for human expression (but without the initiator methionine codon or the stop codon) are provided in SEQ ID NOS: 125, 127, 129, 131, 133, 135, 137, 139, 141, 143, 145, 147 and 149, respectively.

[0280] Exemplary DNA sequences for TATκ11, TATκ28, Antennapedia, Transportan and P97 that are codon-optimized for human expression (but without the initiator methionine codon or the stop codon) are provided in SEQ ID NOS: 150-154, respectively. Exemplary DNA sequences for TATκκ28 that are codon-optimized for human expression (but without the initiator methionine codon or the stop codon) using different codon optimization tools are provided in SEQ ID NOS: 170-173

[0281] An exemplary DNA sequence for mBIP that is codon-optimized for human expression (including the initiator methionine codon but without the stop codon) is provided in SEQ ID NO: 155. An exemplary DNA sequence for mvBIP that is codon-optimized for human expression (including the initiator methionine codon but without the stop codon) is provided in SEQ ID NO: 169.

### Example 18—CDKL5 Cross-Correction

[0282] In this Example, CDKL5 null mice were used for determining BIP-TATκ28-CDKL5 induced cross-correction. The CDKL5 null mice were divided into a treatment group and a control group. The treatment group was administered AAV-PHP.B.CBH.BIP-TATκ28-CDKL5.SV40 through intracerebroventricular (ICV) injection in an amount of 10×e⁹ GC/mice or 10×e¹⁰ GC/mice. The control group mice were administered PBS. Three months post-administration, the impact of the vector on behavioral endpoints was assessed and the mice were euthanized for transgene expression analysis.

[0283] After euthanizing mice, sections of brain were taken. The sections were stained with DAPI, anti-NeuN antibody, anti-CDKL5 RNA riboprobe and anti-CDKL5 protein antibody. FIG. 27-29 shows anti-NeuN antibody, anti-CDKL5 RNA riboprobe and anti-CDKL5 protein antibody stained images of striatum, thalamus and hippocampal formation regions of brains, respectively.

[0284] An image analysis was performed using Visiopharm software and the cells were divided into six groups: (1) DAPI stain to identify cells; (2) NeuN stain to identify neurons; (3) Neurons having CDKL5 mRNA and CDKL5 protein; (4) Neurons having CDKL5 mRNA; and (5) Cross-corrected neurons. FIG. 30 shows the image of identified six groups. FIGS. 29A and 29B represents image of immunostained brain section from the control group, whereas FIGS. 29C and 29D represents image of immunostained brain section from the treatment group. FIGS. 29A and 29C represents image of brain section stained with DAPI, anti-NeuN and anti-CDKL5 protein. FIGS. 29B and 29D represents image of brain section labeled with DAPI and anti-CDKL5 mRNA. FIG. 31 shows identified cross-corrected cells. FIG. 32A shows statistical analysis of cross-corrected neurons in a sagittal section. FIG. 32B shows statistical analysis of cross-corrected neurons in the specific brain regions, isocortex, striatum, thalamus and hippocampal formation, of the sagittal section.

### Example 19—Comparison of N-Terminal and C-Terminal CPPs

[0285] An exemplary plasmid for expressing various fusion proteins is shown in FIG. 33. This plasmid contains an EF1a promoter, a multiple cloning site (MCS), an IRES followed by Puromycin resistance, nuclear localized GFP, and nanoluciferase. The proteins after the IRES are separated by a T2A skip peptide. The plasmid will be tested for expressing the fusion proteins provided in Table 4 below:

TABLE 4

| Plasmid | Leader Signal | | CDKL5 | C-terminal | Codon |
|---|---|---|---|---|---|
| No. | Polypeptide | N-terminal CPP | Polypeptide | CPP | Optimization |
| 1 | mBIP | TATκ28 | CDKL5(107) | None | Gene Art |
| 2 | mBIP | TATκ11 | CDKL5(107) | None | Gene Art |
| 3 | mBIP | Transportan | CDKL5(107) | None | Gene Art |
| 4 | mBIP | Antennapedia | CDKL5(107) | None | Gene Art |
| 5 | mBIP | Melanotranferrin | CDKL5(107) | None | Gene Art |
| | | p97 | | | |
| 6 | mBIP | None | CDKL5(107) | TATκ28 | Gene Art |
| 7 | mBIP | None | CDKL5(107) | TATκ11 | Gene Art |
| 8 | mBIP | None | CDKL5(107) | Transportan | Gene Art |
| 9 | mBIP | None | CDKL5(107) | Antennapedia | Gene Art |
| 10 | mBIP | None | CDKL5(107) | Melanotranferrin | Gene Art |
| | | | | p97 | |
| 11 | mBIP | None | CDKL5(107) | None | Gene Art |
| 12 | mBIP | TATκ28 | CDKL5(107) | None | GenScript |
| 13 | mBIP | TATκ11 | CDKL5(107) | None | GenScript |
| 14 | mBIP | Transportan | CDKL5(107) | None | GenScript |
| 15 | mBIP | Antennapedia | CDKL5(107) | None | GenScript |
| 16 | mBIP | Melanotranferrin | CDKL5(107) | None | GenScript |
| | | p97 | | | |
| 17 | mBIP | None | CDKL5(107) | TATκ28 | GenScript |
| 18 | mBIP | None | CDKL5(107) | TATκ11 | GenScript |
| 19 | mBIP | None | CDKL5(107) | Transportan | GenScript |
| 20 | mBIP | None | CDKL5(107) | Antennapedia | GenScript |
| 21 | mBIP | None | CDKL5(107) | Melanotranferrin | GenScript |
| | | | | p97 | |
| 22 | mBIP | None | CDKL5(107) | None | GenScript |
| 23 | mBIP | TATκ28 | CDKL5(107) | None | SnapGene |
| 24 | mBIP | TATκ11 | CDKL5(107) | None | SnapGene |
| 25 | mBIP | Transportan | CDKL5(107) | None | SnapGene |
| 26 | mBIP | Antennapedia | CDKL5(107) | None | SnapGene |
| 27 | mBIP | Melanotranferrin | CDKL5(107) | None | SnapGene |
| | | p97 | | | |
| 28 | mBIP | None | CDKL5(107) | TATκ28 | SnapGene |
| 29 | mBIP | None | CDKL5(107) | TATκ11 | SnapGene |
| 30 | mBIP | None | CDKL5(107) | Transportan | SnapGene |
| 31 | mBIP | None | CDKL5(107) | Antennapedia | SnapGene |
| 32 | mBIP | None | CDKL5(107) | Melanotranferrin | SnapGene |
| | | | | p97 | |
| 33 | mBIP | None | CDKL5(107) | None | SnapGene |
| 34 | mBIP | TATκ28 | CDKL5(107) | None | COOL |
| 35 | mBIP | TATκ11 | CDKL5(107) | None | COOL |
| 36 | mBIP | Transportan | CDKL5(107) | None | COOL |
| 37 | mBIP | Antennapedia | CDKL5(107) | None | COOL |
| 38 | mBIP | Melanotranferrin | CDKL5(107) | None | COOL |
| | | p97 | | | |
| 39 | mBIP | None | CDKL5(107) | TATκ28 | COOL |
| 40 | mBIP | None | CDKL5(107) | TATκ11 | COOL |
| 41 | mBIP | None | CDKL5(107) | Transportan | COOL |
| 42 | mBIP | None | CDKL5(107) | Antennapedia | COOL |
| 43 | mBIP | None | CDKL5(107) | Melanotranferrin | COOL |
| | | | | p97 | |
| 44 | mBIP | None | CDKL5(107) | None | COOL |
| 45 | mBIP | None | CDKL5(107) | TATκκ28 | Gene Art |
| 46 | mBIP | None | CDKL5(107) | TATκκ28 | GenScript |
| 47 | mBIP | None | CDKL5(107) | TATκκ28 | SnapGene |
| 48 | mBIP | None | CDKL5(107) | TATκκ28 | COOL |
| 49 | mvBIP | TATκ28 | CDKL5(107) | None | SnapGene |
| 50 | mvBIP | None | CDKL5(107) | TATκ28 | SnapGene |

[0286] Reference throughout this specification to “one embodiment,” “certain embodiments,” “various embodiments,” “one or more embodiments” or “an embodiment” means that a particular feature, structure, material, or characteristic described in connection with the embodiment is included in at least one embodiment of the disclosure. Thus, the appearances of the phrases such as “in one or more embodiments,” “in certain embodiments,” “in various embodiments,” “in one embodiment” or “in an embodiment” in various places throughout this specification are not necessarily referring to the same embodiment of the disclosure. Furthermore, the particular features, structures, materials, or characteristics may be combined in any suitable manner in one or more embodiments.

[0287] Although the disclosure herein provided a description with reference to particular embodiments, it is to be understood that these embodiments are merely illustrative of the principles and applications of the disclosure. It will be apparent to those skilled in the art that various modifications and variations can be made to the present disclosure without departing from the spirit and scope thereof. Thus, it is intended that the present disclosure include modifications and variations that are within the scope of the appended claims and their equivalents.

```
SEQUENCE LISTING
CDKL5₁₀₇ isoform polypeptide 1-960 (full-length)
SEQ ID NO: 1
MKIPNIGNVMNKFEILGVVGEGAYGVVLKCRHKETHEIVAIKKFKDSEENEEVKETTLRELKM
LRTLKQENIVELKEAFRRRGKLYLVFEYVEKNMLELLEEMPNGVPPEKVKSYIYQLIKAIHWC
HKNDIVHRDIKPENLLISHNDVLKLCDFGFARNLSEGNNANYTEYVATRWYRSPELLLGAPYG
KSVDMWSVGCILGELSDGQPLFPGESEIDQLFTIQKVLGPLPSEQMKLFYSNPRFHGLRFPAV
NHPQSLERRYLGILNSVLLDLMKNLLKLDPADRYLTEQCLNHPTFQTQRLLDRSPSRSAKRKP
YHVESSTLSNRNQAGKSTALQSHHRSNSKDIQNLSVGLPRADEGLPANESFLNGNLAGASLSP
LHTKTYQASSQPGSTSKDLTNNNIPHLLSPKEAKSKTEFDFNIDPKPSEGPGTKYLKSNSRSQ
QNRHSFMESSQSKAGTLQPNEKQSRHSYIDTIPQSSRSPSYRTKAKSHGALSDSKSVSNLSEA
RAQIAEPSTSRYFPSSCLDLNSPTSPTPTRHSDTRTLLSPSGRNNRNEGTLDSRRTTTRHSKT
MEELKLPEHMDSSHSHSLSAPHESFSYGLGYTSPFSSQQRPHRHSMYVTRDKVRAKGLDGSLS
IGQGMAARANSLQLLSPQPGEQLPPEMTVARSSVKETSREGTSSFHTRQKSEGGVYHDPHSDD
GTAPKENRHLYNDPVPRRVGSFYRVPSPRPDNSFHENNVSTRVSSLPSESSSGTNHSKRQPAF
DPWKSPENISHSEQLKEKEKQGFFRSMKKKKKKSQTVPNSDSPDLLTLQKSIHSASTPSSRPK
EWRPEKISDLQTQSQPLKSLRKLLHLSSASNHPASSDPRFQPLTAQQTKNSFSEIRIHPLSQA
SGGSSNIRQEPAPKGRPALQLPGQMDPGWHVSSVTRSATEGPSYSEQLGAKSGPNGHPYNRTN
RSRMPNLNDLKETAL
CDKL5₁₀₇ Variant Δ853-960
SEQ ID NO: 2
MKIPNIGNVMNKFEILGVVGEGAYGVVLKCRHKETHEIVAIKKFKDSEENEEVKETTLRELKM
LRTLKQENIVELKEAFRRRGKLYLVFEYVEKNMLELLEEMPNGVPPEKVKSYIYQLIKAIHWC
HKNDIVHRDIKPENLLISHNDVLKLCDFGFARNLSEGNNANYTEYVATRWYRSPELLLGAPYG
KSVDMWSVGCILGELSDGQPLFPGESEIDQLFTIQKVLGPLPSEQMKLFYSNPRFHGLRFPAV
NHPQSLERRYLGILNSVLLDLMKNLLKLDPADRYLTEQCLNHPTFQTQRLLDRSPSRSAKRKP
YHVESSTLSNRNQAGKSTALQSHHRSNSKDIQNLSVGLPRADEGLPANESFLNGNLAGASLSP
LHTKTYQASSQPGSTSKDLTNNNIPHLLSPKEAKSKTEFDFNIDPKPSEGPGTKYLKSNSRSQ
QNRHSFMESSQSKAGTLQPNEKQSRHSYIDTIPQSSRSPSYRTKAKSHGALSDSKSVSNLSEA
RAQIAEPSTSRYFPSSCLDLNSPTSPTPTRHSDTRTLLSPSGRNNRNEGTLDSRRTTTRHSKT
MEELKLPEHMDSSHSHSLSAPHESFSYGLGYTSPFSSQQRPHRHSMYVTRDKVRAKGLDGSLS
IGQGMAARANSLQLLSPQPGEQLPPEMTVARSSVKETSREGTSSFHTRQKSEGGVYHDPHSDD
GTAPKENRHLYNDPVPRRVGSFYRVPSPRPDNSFHENNVSTRVSSLPSESSSGTNHSKRQPAF
DPWKSPENISHSEQLKEKEKQGFFRSMKKKKKKSQTVPNSDSPDLLTLQKSIHSASTPSSRPK
EWRPEKISDLQTQSQPLKSLRKLLHLSSASNHP
CDKL5₁₀₇ Variant Δ745-960
SEQ ID NO: 3
MKIPNIGNVMNKFEILGVVGEGAYGVVLKCRHKETHEIVAIKKFKDSEENEEVKETTLRELKM
LRTLKQENIVELKEAFRRRGKLYLVFEYVEKNMLELLEEMPNGVPPEKVKSYIYQLIKAIHWC
HKNDIVHRDIKPENLLISHNDVLKLCDFGFARNLSEGNNANYTEYVATRWYRSPELLLGAPYG
KSVDMWSVGCILGELSDGQPLFPGESEIDQLFTIQKVLGPLPSEQMKLFYSNPRFHGLRFPAV
NHPQSLERRYLGILNSVLLDLMKNLLKLDPADRYLTEQCLNHPTFQTQRLLDRSPSRSAKRKP
YHVESSTLSNRNQAGKSTALQSHHRSNSKDIQNLSVGLPRADEGLPANESFLNGNLAGASLSP
LHTKTYQASSQPGSTSKDLTNNNIPHLLSPKEAKSKTEFDFNIDPKPSEGPGTKYLKSNSRSQ
QNRHSFMESSQSKAGTLQPNEKQSRHSYIDTIPQSSRSPSYRTKAKSHGALSDSKSVSNLSEA
RAQIAEPSTSRYFPSSCLDLNSPTSPTPTRHSDTRTLLSPSGRNNRNEGTLDSRRTTTRHSKT
MEELKLPEHMDSSHSHSLSAPHESFSYGLGYTSPFSSQQRPHRHSMYVTRDKVRAKGLDGSLS
IGQGMAARANSLQLLSPQPGEQLPPEMTVARSSVKETSREGTSSFHTRQKSEGGVYHDPHSDD
GTAPKENRHLYNDPVPRRVGSFYRVPSPRPDNSFHENNVSTRVSSLPSESS
CDKL5₁₀₇ Variant Δ637-960
SEQ ID NO: 4
MKIPNIGNVMNKFEILGVVGEGAYGVVLKCRHKETHEIVAIKKFKDSEENEEVKETTLRELKM
LRTLKQENIVELKEAFRRRGKLYLVFEYVEKNMLELLEEMPNGVPPEKVKSYIYQLIKAIHWC
HKNDIVHRDIKPENLLISHNDVLKLCDFGFARNLSEGNNANYTEYVATRWYRSPELLLGAPYG
KSVDMWSVGCILGELSDGQPLFPGESEIDQLFTIQKVLGPLPSEQMKLFYSNPRFHGLRFPAV
NHPQSLERRYLGILNSVLLDLMKNLLKLDPADRYLTEQCLNHPTFQTQRLLDRSPSRSAKRKP
YHVESSTLSNRNQAGKSTALQSHHRSNSKDIQNLSVGLPRADEGLPANESFLNGNLAGASLSP
LHTKTYQASSQPGSTSKDLTNNNIPHLLSPKEAKSKTEFDFNIDPKPSEGPGTKYLKSNSRSQ
QNRHSFMESSQSKAGTLQPNEKQSRHSYIDTIPQSSRSPSYRTKAKSHGALSDSKSVSNLSEA
RAQIAEPSTSRYFPSSCLDLNSPTSPTPTRHSDTRTLLSPSGRNNRNEGTLDSRRTTTRHSKT
MEELKLPEHMDSSHSHSLSAPHESFSYGLGYTSPFSSQQRPHRHSMYVTRDKVRAKGLDGSLS
IGQGMA
CDKL5₁₀₇ Variant Δ529-960
SEQ ID NO: 5
MKIPNIGNVMNKFEILGVVGEGAYGVVLKCRHKETHEIVAIKKFKDSEENEEVKETTLRELKM
LRTLKQENIVELKEAFRRRGKLYLVFEYVEKNMLELLEEMPNGVPPEKVKSYIYQLIKAIHWC
HKNDIVHRDIKPENLLISHNDVLKLCDFGFARNLSEGNNANYTEYVATRWYRSPELLLGAPYG
KSVDMWSVGCILGELSDGQPLFPGESEIDQLFTIQKVLGPLPSEQMKLFYSNPRFHGLRFPAV
NHPQSLERRYLGILNSVLLDLMKNLLKLDPADRYLTEQCLNHPTFQTQRLLDRSPSRSAKRKP
YHVESSTLSNRNQAGKSTALQSHHRSNSKDIQNLSVGLPRADEGLPANESFLNGNLAGASLSP
LHTKTYQASSQPGSTSKDLTNNNIPHLLSPKEAKSKTEFDFNIDPKPSEGPGTKYLKSNSRSQ
QNRHSFMESSQSKAGTLQPNEKQSRHSYIDTIPQSSRSPSYRTKAKSHGALSDSKSVSNLSEA
RAQIAEPSTSRYFPSSCLDLNSPT
CDKL5₁₀₇ Variant Δ421-960
SEQ ID NO: 6
MKIPNIGNVMNKFEILGVVGEGAYGVVLKCRHKETHEIVAIKKFKDSEENEEVKETTLRELKM
LRTLKQENIVELKEAFRRRGKLYLVFEYVEKNMLELLEEMPNGVPPEKVKSYIYQLIKAIHWC
HKNDIVHRDIKPENLLISHNDVLKLCDFGFARNLSEGNNANYTEYVATRWYRSPELLLGAPYG
KSVDMWSVGCILGELSDGQPLFPGESEIDQLFTIQKVLGPLPSEQMKLFYSNPRFHGLRFPAV
NHPQSLERRYLGILNSVLLDLMKNLLKLDPADRYLTEQCLNHPTFQTQRLLDRSPSRSAKRKP
YHVESSTLSNRNQAGKSTALQSHHRSNSKDIQNLSVGLPRADEGLPANESFLNGNLAGASLSP
LHTKTYQASSQPGSTSKDLTNNNIPHLLSPKEAKSKTEFDFN
CDKL5₁₀₇ Variant Δ315-960
SEQ ID NO: 7
MKIPNIGNVMNKFEILGVVGEGAYGVVLKCRHKETHEIVAIKKFKDSEENEEVKETTLRELKM
LRTLKQENIVELKEAFRRRGKLYLVFEYVEKNMLELLEEMPNGVPPEKVKSYIYQLIKAIHWC
HKNDIVHRDIKPENLLISHNDVLKLCDFGFARNLSEGNNANYTEYVATRWYRSPELLLGAPYG
KSVDMWSVGCILGELSDGQPLFPGESEIDQLFTIQKVLGPLPSEQMKLFYSNPRFHGLRFPAV
NHPQSLERRYLGILNSVLLDLMKNLLKLDPADRYLTEQCLNHPTFQTQRLLDRSPSRSAKRK
CDKL5₁₀₇ Variant Δ315-420
SEQ ID NO: 8
MKIPNIGNVMNKFEILGVVGEGAYGVVLKCRHKETHEIVAIKKFKDSEENEEVKETTLRELKM
LRTLKQENIVELKEAFRRRGKLYLVFEYVEKNMLELLEEMPNGVPPEKVKSYIYQLIKAIHWC
HKNDIVHRDIKPENLLISHNDVLKLCDFGFARNLSEGNNANYTEYVATRWYRSPELLLGAPYG
KSVDMWSVGCILGELSDGQPLFPGESEIDQLFTIQKVLGPLPSEQMKLFYSNPRFHGLRFPAV
NHPQSLERRYLGILNSVLLDLMKNLLKLDPADRYLTEQCLNHPTFQTQRLLDRSPSRSAKRKI
DPKPSEGPGTKYLKSNSRSQQNRHSFMESSQSKAGTLQPNEKQSRHSYIDTIPQSSRSPSYRT
KAKSHGALSDSKSVSNLSEARAQIAEPSTSRYFPSSCLDLNSPTSPTPTRHSDTRTLLSPSGR
NNRNEGTLDSRRTTTRHSKTMEELKLPEHMDSSHSHSLSAPHESFSYGLGYTSPFSSQQRPHR
HSMYVTRDKVRAKGLDGSLSIGQGMAARANSLQLLSPQPGEQLPPEMTVARSSVKETSREGTS
SFHTRQKSEGGVYHDPHSDDGTAPKENRHLYNDPVPRRVGSFYRVPSPRPDNSFHENNVSTRV
SSLPSESSSGTNHSKRQPAFDPWKSPENISHSEQLKEKEKQGFFRSMKKKKKKSQTVPNSDSP
DLLTLQKSIHSASTPSSRPKEWRPEKISDLQTQSQPLKSLRKLLHLSSASNHPASSDPRFQPL
TAQQTKNSFSEIRIHPLSQASGGSSNIRQEPAPKGRPALQLPGQMDPGWHVSSVTRSATEGPS
YSEQLGAKSGPNGHPYNRTNRSRMPNLNDLKETAL
CDKL5₁₀₇ Variant Δ315-528
SEQ ID NO: 9
MKIPNIGNVMNKFEILGVVGEGAYGVVLKCRHKETHEIVAIKKFKDSEENEEVKETTLRELKM
LRTLKQENIVELKEAFRRRGKLYLVFEYVEKNMLELLEEMPNGVPPEKVKSYIYQLIKAIHWC
HKNDIVHRDIKPENLLISHNDVLKLCDFGFARNLSEGNNANYTEYVATRWYRSPELLLGAPYG
KSVDMWSVGCILGELSDGQPLFPGESEIDQLFTIQKVLGPLPSEQMKLFYSNPRFHGLRFPAV
NHPQSLERRYLGILNSVLLDLMKNLLKLDPADRYLTEQCLNHPTFQTQRLLDRSPSRSAKRKS
PTPTRHSDTRTLLSPSGRNNRNEGTLDSRRTTTRHSKTMEELKLPEHMDSSHSHSLSAPHESF
SYGLGYTSPFSSQQRPHRHSMYVTRDKVRAKGLDGSLSIGQGMAARANSLQLLSPQPGEQLPP
EMTVARSSVKETSREGTSSFHTRQKSEGGVYHDPHSDDGTAPKENRHLYNDPVPRRVGSFYRV
PSPRPDNSFHENNVSTRVSSLPSESSSGTNHSKRQPAFDPWKSPENISHSEQLKEKEKQGFFR
SMKKKKKKSQTVPNSDSPDLLTLQKSIHSASTPSSRPKEWRPEKISDLQTQSQPLKSLRKLLH
LSSASNHPASSDPRFQPLTAQQTKNSFSEIRIHPLSQASGGSSNIRQEPAPKGRPALQLPGQM
DPGWHVSSVTRSATEGPSYSEQLGAKSGPNGHPYNRTNRSRMPNLNDLKETAL
CDKL5₁₀₇ Variant Δ315-636
SEQ ID NO: 10
MKIPNIGNVMNKFEILGVVGEGAYGVVLKCRHKETHEIVAIKKFKDSEENEEVKETTLRELKM
LRTLKQENIVELKEAFRRRGKLYLVFEYVEKNMLELLEEMPNGVPPEKVKSYIYQLIKAIHWC
HKNDIVHRDIKPENLLISHNDVLKLCDFGFARNLSEGNNANYTEYVATRWYRSPELLLGAPYG
KSVDMWSVGCILGELSDGQPLFPGESEIDQLFTIQKVLGPLPSEQMKLFYSNPRFHGLRFPAV
NHPQSLERRYLGILNSVLLDLMKNLLKLDPADRYLTEQCLNHPTFQTQRLLDRSPSRSAKRKA
RANSLQLLSPQPGEQLPPEMTVARSSVKETSREGTSSFHTRQKSEGGVYHDPHSDDGTAPKEN
RHLYNDPVPRRVGSFYRVPSPRPDNSFHENNVSTRVSSLPSESSSGTNHSKRQPAFDPWKSPE
NISHSEQLKEKEKQGFFRSMKKKKKKSQTVPNSDSPDLLTLQKSIHSASTPSSRPKEWRPEKI
SDLQTQSQPLKSLRKLLHLSSASNHPASSDPRFQPLTAQQTKNSFSEIRIHPLSQASGGSSNI
RQEPAPKGRPALQLPGQMDPGWHVSSVTRSATEGPSYSEQLGAKSGPNGHPYNRTNRSRMPNL
NDLKETAL
CDKL5₁₀₇ Variant Δ315-744
SEQ ID NO: 11
MKIPNIGNVMNKFEILGVVGEGAYGVVLKCRHKETHEIVAIKKFKDSEENEEVKETTLRELKM
LRTLKQENIVELKEAFRRRGKLYLVFEYVEKNMLELLEEMPNGVPPEKVKSYIYQLIKAIHWC
HKNDIVHRDIKPENLLISHNDVLKLCDFGFARNLSEGNNANYTEYVATRWYRSPELLLGAPYG
KSVDMWSVGCILGELSDGQPLFPGESEIDQLFTIQKVLGPLPSEQMKLFYSNPRFHGLRFPAV
NHPQSLERRYLGILNSVLLDLMKNLLKLDPADRYLTEQCLNHPTFQTQRLLDRSPSRSAKRKS
GTNHSKRQPAFDPWKSPENISHSEQLKEKEKQGFFRSMKKKKKKSQTVPNSDSPDLLTLQKSI
HSASTPSSRPKEWRPEKISDLQTQSQPLKSLRKLLHLSSASNHPASSDPRFQPLTAQQTKNSF
SEIRIHPLSQASGGSSNIRQEPAPKGRPALQLPGQMDPGWHVSSVTRSATEGPSYSEQLGAKS
GPNGHPYNRTNRSRMPNLNDLKETAL
CDKL5₁₀₇ Variant Δ315-852
SEQ ID NO: 12
MKIPNIGNVMNKFEILGVVGEGAYGVVLKCRHKETHEIVAIKKFKDSEENEEVKETTLRELKM
LRTLKQENIVELKEAFRRRGKLYLVFEYVEKNMLELLEEMPNGVPPEKVKSYIYQLIKAIHWC
HKNDIVHRDIKPENLLISHNDVLKLCDFGFARNLSEGNNANYTEYVATRWYRSPELLLGAPYG
KSVDMWSVGCILGELSDGQPLFPGESEIDQLFTIQKVLGPLPSEQMKLFYSNPRFHGLRFPAV
NHPQSLERRYLGILNSVLLDLMKNLLKLDPADRYLTEQCLNHPTFQTQRLLDRSPSRSAKRKA
SSDPRFQPLTAQQTKNSFSEIRIHPLSQASGGSSNIRQEPAPKGRPALQLPGQMDPGWHVSSV
TRSATEGPSYSEQLGAKSGPNGHPYNRTNRSRMPNLNDLKETAL
CDKL5₁₀₇ Variant 1-7NQ
SEQ ID NO: 13
MKIPNIGNVMNKFEILGVVGEGAYGVVLKCRHKETHEIVAIKKFKDSEENEEVKETTLRELKM
LRTLKQENIVELKEAFRRRGKLYLVFEYVEKNMLELLEEMPNGVPPEKVKSYIYQLIKAIHWC
HKNDIVHRDIKPENLLISHNDVLKLCDFGFARQLSEGNNAQYTEYVATRWYRSPELLLGAPYG
KSVDMWSVGCILGELSDGQPLFPGESEIDQLFTIQKVLGPLPSEQMKLFYSNPRFHGLRFPAV
NHPQSLERRYLGILNSVLLDLMKNLLKLDPADRYLTEQCLNHPTFQTQRLLDRSPSRSAKRKP
YHVESSTLSNRNQAGKSTALQSHHRSNSKDIQQLSVGLPRADEGLPANESFLNGNLAGASLSP
LHTKTYQASSQPGSTSKDLTNNNIPHLLSPKEAKSKTEFDFNIDPKPSEGPGTKYLKSNSRSQ
QNRHSFMESSQSKAGTLQPNEKQSRHSYIDTIPQSSRSPSYRTKAKSHGALSDSKSVSQLSEA
RAQIAEPSTSRYFPSSCLDLNSPTSPTPTRHSDTRTLLSPSGRNNRNEGTLDSRRTTTRHSKT
MEELKLPEHMDSSHSHSLSAPHESFSYGLGYTSPFSSQQRPHRHSMYVTRDKVRAKGLDGSLS
IGQGMAARANSLQLLSPQPGEQLPPEMTVARSSVKETSREGTSSFHTRQKSEGGVYHDPHSDD
GTAPKENRHLYNDPVPRRVGSFYRVPSPRPDNSFHENNVSTRVSSLPSESSSGTNHSKRQPAF
DPWKSPEQISHSEQLKEKEKQGFFRSMKKKKKKSQTVPNSDSPDLLTLQKSIHSASTPSSRPK
EWRPEKISDLQTQSQPLKSLRKLLHLSSASNHPASSDPRFQPLTAQQTKNSFSEIRIHPLSQA
SGGSSNIRQEPAPKGRPALQLPGQMDPGWHVSSVTRSATEGPSYSEQLGAKSGPNGHPYQRTQ
RSRMPNLNDLKETAL
CDKL5₁₀₇ Variant 2-7NQ
SEQ ID NO: 14
MKIPNIGNVMNKFEILGVVGEGAYGVVLKCRHKETHEIVAIKKFKDSEENEEVKETTLRELKM
LRTLKQENIVELKEAFRRRGKLYLVFEYVEKNMLELLEEMPNGVPPEKVKSYIYQLIKAIHWC
HKNDIVHRDIKPENLLISHNDVLKLCDFGFARNLSEGNNAQYTEYVATRWYRSPELLLGAPYG
KSVDMWSVGCILGELSDGQPLFPGESEIDQLFTIQKVLGPLPSEQMKLFYSNPRFHGLRFPAV
NHPQSLERRYLGILNSVLLDLMKNLLKLDPADRYLTEQCLNHPTFQTQRLLDRSPSRSAKRKP
YHVESSTLSNRNQAGKSTALQSHHRSNSKDIQQLSVGLPRADEGLPANESFLNGNLAGASLSP
LHTKTYQASSQPGSTSKDLTNNNIPHLLSPKEAKSKTEFDFNIDPKPSEGPGTKYLKSNSRSQ
QNRHSFMESSQSKAGTLQPNEKQSRHSYIDTIPQSSRSPSYRTKAKSHGALSDSKSVSQLSEA
RAQIAEPSTSRYFPSSCLDLNSPTSPTPTRHSDTRTLLSPSGRNNRNEGTLDSRRTTTRHSKT
MEELKLPEHMDSSHSHSLSAPHESFSYGLGYTSPFSSQQRPHRHSMYVTRDKVRAKGLDGSLS
IGQGMAARANSLQLLSPQPGEQLPPEMTVARSSVKETSREGTSSFHTRQKSEGGVYHDPHSDD
GTAPKENRHLYNDPVPRRVGSFYRVPSPRPDNSFHENNVSTRVSSLPSESSSGTNHSKRQPAF
DPWKSPEQISHSEQLKEKEKQGFFRSMKKKKKKSQTVPNSDSPDLLTLQKSIHSASTPSSRPK
EWRPEKISDLQTQSQPLKSLRKLLHLSSASNHPASSDPRFQPLTAQQTKNSFSEIRIHPLSQA
SGGSSNIRQEPAPKGRPALQLPGQMDPGWHVSSVTRSATEGPSYSEQLGAKSGPNGHPYQRTQ
RSRMPNLNDLKETAL
CDKL5₁₀₇ Variant 1,3-7NQ
SEQ ID NO: 15
MKIPNIGNVMNKFEILGVVGEGAYGVVLKCRHKETHEIVAIKKFKDSEENEEVKETTLRELKM
LRTLKQENIVELKEAFRRRGKLYLVFEYVEKNMLELLEEMPNGVPPEKVKSYIYQLIKAIHWC
HKNDIVHRDIKPENLLISHNDVLKLCDFGFARQLSEGNNANYTEYVATRWYRSPELLLGAPYG
KSVDMWSVGCILGELSDGQPLFPGESEIDQLFTIQKVLGPLPSEQMKLFYSNPRFHGLRFPAV
NHPQSLERRYLGILNSVLLDLMKNLLKLDPADRYLTEQCLNHPTFQTQRLLDRSPSRSAKRKP
YHVESSTLSNRNQAGKSTALQSHHRSNSKDIQQLSVGLPRADEGLPANESFLNGNLAGASLSP
LHTKTYQASSQPGSTSKDLTNNNIPHLLSPKEAKSKTEFDFNIDPKPSEGPGTKYLKSNSRSQ
QNRHSFMESSQSKAGTLQPNEKQSRHSYIDTIPQSSRSPSYRTKAKSHGALSDSKSVSQLSEA
RAQIAEPSTSRYFPSSCLDLNSPTSPTPTRHSDTRTLLSPSGRNNRNEGTLDSRRTTTRHSKT
MEELKLPEHMDSSHSHSLSAPHESFSYGLGYTSPFSSQQRPHRHSMYVTRDKVRAKGLDGSLS
IGQGMAARANSLQLLSPQPGEQLPPEMTVARSSVKETSREGTSSFHTRQKSEGGVYHDPHSDD
GTAPKENRHLYNDPVPRRVGSFYRVPSPRPDNSFHENNVSTRVSSLPSESSSGTNHSKRQPAF
DPWKSPEQISHSEQLKEKEKQGFFRSMKKKKKKSQTVPNSDSPDLLTLQKSIHSASTPSSRPK
EWRPEKISDLQTQSQPLKSLRKLLHLSSASNHPASSDPRFQPLTAQQTKNSFSEIRIHPLSQA
SGGSSNIRQEPAPKGRPALQLPGQMDPGWHVSSVTRSATEGPSYSEQLGAKSGPNGHPYQRTQ
RSRMPNLNDLKETAL
CDKL5₁₀₇ Variant l-2,4-7NQ
SEQ ID NO: 16
MKIPNIGNVMNKFEILGVVGEGAYGVVLKCRHKETHEIVAIKKFKDSEENEEVKETTLRELKM
LRTLKQENIVELKEAFRRRGKLYLVFEYVEKNMLELLEEMPNGVPPEKVKSYIYQLIKAIHWC
HKNDIVHRDIKPENLLISHNDVLKLCDFGFARQLSEGNNAQYTEYVATRWYRSPELLLGAPYG
KSVDMWSVGCILGELSDGQPLFPGESEIDQLFTIQKVLGPLPSEQMKLFYSNPRFHGLRFPAV
NHPQSLERRYLGILNSVLLDLMKNLLKLDPADRYLTEQCLNHPTFQTQRLLDRSPSRSAKRKP
YHVESSTLSNRNQAGKSTALQSHHRSNSKDIQNLSVGLPRADEGLPANESFLNGNLAGASLSP
LHTKTYQASSQPGSTSKDLTNNNIPHLLSPKEAKSKTEFDFNIDPKPSEGPGTKYLKSNSRSQ
QNRHSFMESSQSKAGTLQPNEKQSRHSYIDTIPQSSRSPSYRTKAKSHGALSDSKSVSQLSEA
RAQIAEPSTSRYFPSSCLDLNSPTSPTPTRHSDTRTLLSPSGRNNRNEGTLDSRRTTTRHSKT
MEELKLPEHMDSSHSHSLSAPHESFSYGLGYTSPFSSQQRPHRHSMYVTRDKVRAKGLDGSLS
IGQGMAARANSLQLLSPQPGEQLPPEMTVARSSVKETSREGTSSFHTRQKSEGGVYHDPHSDD
GTAPKENRHLYNDPVPRRVGSFYRVPSPRPDNSFHENNVSTRVSSLPSESSSGTNHSKRQPAF
DPWKSPEQISHSEQLKEKEKQGFFRSMKKKKKKSQTVPNSDSPDLLTLQKSIHSASTPSSRPK
EWRPEKISDLQTQSQPLKSLRKLLHLSSASNHPASSDPRFQPLTAQQTKNSFSEIRIHPLSQA
SGGSSNIRQEPAPKGRPALQLPGQMDPGWHVSSVTRSATEGPSYSEQLGAKSGPNGHPYQRTQ
RSRMPNLNDLKETAL
CDKL5₁₀₇ Variant l-3,5-7NQ
SEQ ID NO: 17
MKIPNIGNVMNKFEILGVVGEGAYGVVLKCRHKETHEIVAIKKFKDSEENEEVKETTLRELKM
LRTLKQENIVELKEAFRRRGKLYLVFEYVEKNMLELLEEMPNGVPPEKVKSYIYQLIKAIHWC
HKNDIVHRDIKPENLLISHNDVLKLCDFGFARQLSEGNNAQYTEYVATRWYRSPELLLGAPYG
KSVDMWSVGCILGELSDGQPLFPGESEIDQLFTIQKVLGPLPSEQMKLFYSNPRFHGLRFPAV
NHPQSLERRYLGILNSVLLDLMKNLLKLDPADRYLTEQCLNHPTFQTQRLLDRSPSRSAKRKP
YHVESSTLSNRNQAGKSTALQSHHRSNSKDIQQLSVGLPRADEGLPANESFLNGNLAGASLSP
LHTKTYQASSQPGSTSKDLTNNNIPHLLSPKEAKSKTEFDFNIDPKPSEGPGTKYLKSNSRSQ
QNRHSFMESSQSKAGTLQPNEKQSRHSYIDTIPQSSRSPSYRTKAKSHGALSDSKSVSNLSEA
RAQIAEPSTSRYFPSSCLDLNSPTSPTPTRHSDTRTLLSPSGRNNRNEGTLDSRRTTTRHSKT
MEELKLPEHMDSSHSHSLSAPHESFSYGLGYTSPFSSQQRPHRHSMYVTRDKVRAKGLDGSLS
IGQGMAARANSLQLLSPQPGEQLPPEMTVARSSVKETSREGTSSFHTRQKSEGGVYHDPHSDD
GTAPKENRHLYNDPVPRRVGSFYRVPSPRPDNSFHENNVSTRVSSLPSESSSGTNHSKRQPAF
DPWKSPEQISHSEQLKEKEKQGFFRSMKKKKKKSQTVPNSDSPDLLTLQKSIHSASTPSSRPK
EWRPEKISDLQTQSQPLKSLRKLLHLSSASNHPASSDPRFQPLTAQQTKNSFSEIRIHPLSQA
SGGSSNIRQEPAPKGRPALQLPGQMDPGWHVSSVTRSATEGPSYSEQLGAKSGPNGHPYQRTQ
RSRMPNLNDLKETAL
CDKL5₁₀₇ Variant l-4,6-7NQ
SEQ ID NO: 18
MKIPNIGNVMNKFEILGVVGEGAYGVVLKCRHKETHEIVAIKKFKDSEENEEVKETTLRELKM
LRTLKQENIVELKEAFRRRGKLYLVFEYVEKNMLELLEEMPNGVPPEKVKSYIYQLIKAIHWC
HKNDIVHRDIKPENLLISHNDVLKLCDFGFARQLSEGNNAQYTEYVATRWYRSPELLLGAPYG
KSVDMWSVGCILGELSDGQPLFPGESEIDQLFTIQKVLGPLPSEQMKLFYSNPRFHGLRFPAV
NHPQSLERRYLGILNSVLLDLMKNLLKLDPADRYLTEQCLNHPTFQTQRLLDRSPSRSAKRKP
YHVESSTLSNRNQAGKSTALQSHHRSNSKDIQQLSVGLPRADEGLPANESFLNGNLAGASLSP
LHTKTYQASSQPGSTSKDLTNNNIPHLLSPKEAKSKTEFDFNIDPKPSEGPGTKYLKSNSRSQ
QNRHSFMESSQSKAGTLQPNEKQSRHSYIDTIPQSSRSPSYRTKAKSHGALSDSKSVSQLSEA
RAQIAEPSTSRYFPSSCLDLNSPTSPTPTRHSDTRTLLSPSGRNNRNEGTLDSRRTTTRHSKT
MEELKLPEHMDSSHSHSLSAPHESFSYGLGYTSPFSSQQRPHRHSMYVTRDKVRAKGLDGSLS
IGQGMAARANSLQLLSPQPGEQLPPEMTVARSSVKETSREGTSSFHTRQKSEGGVYHDPHSDD
GTAPKENRHLYNDPVPRRVGSFYRVPSPRPDNSFHENNVSTRVSSLPSESSSGTNHSKRQPAF
DPWKSPENISHSEQLKEKEKQGFFRSMKKKKKKSQTVPNSDSPDLLTLQKSIHSASTPSSRPK
EWRPEKISDLQTQSQPLKSLRKLLHLSSASNHPASSDPRFQPLTAQQTKNSFSEIRIHPLSQA
SGGSSNIRQEPAPKGRPALQLPGQMDPGWHVSSVTRSATEGPSYSEQLGAKSGPNGHPYQRTQ
RSRMPNLNDLKETAL
CDKL5₁₀₇ Variant 1-5,7NQ
SEQ ID NO: 19
MKIPNIGNVMNKFEILGVVGEGAYGVVLKCRHKETHEIVAIKKFKDSEENEEVKETTLRELKM
LRTLKQENIVELKEAFRRRGKLYLVFEYVEKNMLELLEEMPNGVPPEKVKSYIYQLIKAIHWC
HKNDIVHRDIKPENLLISHNDVLKLCDFGFARQLSEGNNAQYTEYVATRWYRSPELLLGAPYG
KSVDMWSVGCILGELSDGQPLFPGESEIDQLFTIQKVLGPLPSEQMKLFYSNPRFHGLRFPAV
NHPQSLERRYLGILNSVLLDLMKNLLKLDPADRYLTEQCLNHPTFQTQRLLDRSPSRSAKRKP
YHVESSTLSNRNQAGKSTALQSHHRSNSKDIQQLSVGLPRADEGLPANESFLNGNLAGASLSP
LHTKTYQASSQPGSTSKDLTNNNIPHLLSPKEAKSKTEFDFNIDPKPSEGPGTKYLKSNSRSQ
QNRHSFMESSQSKAGTLQPNEKQSRHSYIDTIPQSSRSPSYRTKAKSHGALSDSKSVSQLSEA
RAQIAEPSTSRYFPSSCLDLNSPTSPTPTRHSDTRTLLSPSGRNNRNEGTLDSRRTTTRHSKT
MEELKLPEHMDSSHSHSLSAPHESFSYGLGYTSPFSSQQRPHRHSMYVTRDKVRAKGLDGSLS
IGQGMAARANSLQLLSPQPGEQLPPEMTVARSSVKETSREGTSSFHTRQKSEGGVYHDPHSDD
GTAPKENRHLYNDPVPRRVGSFYRVPSPRPDNSFHENNVSTRVSSLPSESSSGTNHSKRQPAF
DPWKSPEQISHSEQLKEKEKQGFFRSMKKKKKKSQTVPNSDSPDLLTLQKSIHSASTPSSRPK
EWRPEKISDLQTQSQPLKSLRKLLHLSSASNHPASSDPRFQPLTAQQTKNSFSEIRIHPLSQA
SGGSSNIRQEPAPKGRPALQLPGQMDPGWHVSSVTRSATEGPSYSEQLGAKSGPNGHPYNRTQ
RSRMPNLNDLKETAL
CDKL5₁₀₇ Variant 1-6NQ
SEQ ID NO: 20
MKIPNIGNVMNKFEILGVVGEGAYGVVLKCRHKETHEIVAIKKFKDSEENEEVKETTLRELKM
LRTLKQENIVELKEAFRRRGKLYLVFEYVEKNMLELLEEMPNGVPPEKVKSYIYQLIKAIHWC
HKNDIVHRDIKPENLLISHNDVLKLCDFGFARQLSEGNNAQYTEYVATRWYRSPELLLGAPYG
KSVDMWSVGCILGELSDGQPLFPGESEIDQLFTIQKVLGPLPSEQMKLFYSNPRFHGLRFPAV
NHPQSLERRYLGILNSVLLDLMKNLLKLDPADRYLTEQCLNHPTFQTQRLLDRSPSRSAKRKP
YHVESSTLSNRNQAGKSTALQSHHRSNSKDIQQLSVGLPRADEGLPANESFLNGNLAGASLSP
LHTKTYQASSQPGSTSKDLTNNNIPHLLSPKEAKSKTEFDFNIDPKPSEGPGTKYLKSNSRSQ
QNRHSFMESSQSKAGTLQPNEKQSRHSYIDTIPQSSRSPSYRTKAKSHGALSDSKSVSQLSEA
RAQIAEPSTSRYFPSSCLDLNSPTSPTPTRHSDTRTLLSPSGRNNRNEGTLDSRRTTTRHSKT
MEELKLPEHMDSSHSHSLSAPHESFSYGLGYTSPFSSQQRPHRHSMYVTRDKVRAKGLDGSLS
IGQGMAARANSLQLLSPQPGEQLPPEMTVARSSVKETSREGTSSFHTRQKSEGGVYHDPHSDD
GTAPKENRHLYNDPVPRRVGSFYRVPSPRPDNSFHENNVSTRVSSLPSESSSGTNHSKRQPAF
DPWKSPEQISHSEQLKEKEKQGFFRSMKKKKKKSQTVPNSDSPDLLTLQKSIHSASTPSSRPK
EWRPEKISDLQTQSQPLKSLRKLLHLSSASNHPASSDPRFQPLTAQQTKNSFSEIRIHPLSQA
SGGSSNIRQEPAPKGRPALQLPGQMDPGWHVSSVTRSATEGPSYSEQLGAKSGPNGHPYQRTN
RSRMPNLNDLKETAL
CDKL5₁₀₇ Variant 2NQ
SEQ ID NO: 21
MKIPNIGNVMNKFEILGVVGEGAYGVVLKCRHKETHEIVAIKKFKDSEENEEVKETTLRELKM
LRTLKQENIVELKEAFRRRGKLYLVFEYVEKNMLELLEEMPNGVPPEKVKSYIYQLIKAIHWC
HKNDIVHRDIKPENLLISHNDVLKLCDFGFARNLSEGNNAQYTEYVATRWYRSPELLLGAPYG
KSVDMWSVGCILGELSDGQPLFPGESEIDQLFTIQKVLGPLPSEQMKLFYSNPRFHGLRFPAV
NHPQSLERRYLGILNSVLLDLMKNLLKLDPADRYLTEQCLNHPTFQTQRLLDRSPSRSAKRKP
YHVESSTLSNRNQAGKSTALQSHHRSNSKDIQNLSVGLPRADEGLPANESFLNGNLAGASLSP
LHTKTYQASSQPGSTSKDLTNNNIPHLLSPKEAKSKTEFDFNIDPKPSEGPGTKYLKSNSRSQ
QNRHSFMESSQSKAGTLQPNEKQSRHSYIDTIPQSSRSPSYRTKAKSHGALSDSKSVSNLSEA
RAQIAEPSTSRYFPSSCLDLNSPTSPTPTRHSDTRTLLSPSGRNNRNEGTLDSRRTTTRHSKT
MEELKLPEHMDSSHSHSLSAPHESFSYGLGYTSPFSSQQRPHRHSMYVTRDKVRAKGLDGSLS
IGQGMAARANSLQLLSPQPGEQLPPEMTVARSSVKETSREGTSSFHTRQKSEGGVYHDPHSDD
GTAPKENRHLYNDPVPRRVGSFYRVPSPRPDNSFHENNVSTRVSSLPSESSSGTNHSKRQPAF
DPWKSPENISHSEQLKEKEKQGFFRSMKKKKKKSQTVPNSDSPDLLTLQKSIHSASTPSSRPK
EWRPEKISDLQTQSQPLKSLRKLLHLSSASNHPASSDPRFQPLTAQQTKNSFSEIRIHPLSQA
SGGSSNIRQEPAPKGRPALQLPGQMDPGWHVSSVTRSATEGPSYSEQLGAKSGPNGHPYNRTN
RSRMPNLNDLKETAL
CDKL5₁₀₇ Variant 1-10NQ
SEQ ID NO: 22
MKIPNIGNVMNKFEILGVVGEGAYGVVLKCRHKETHEIVAIKKFKDSEENEEVKETTLRELKM
LRTLKQENIVELKEAFRRRGKLYLVFEYVEKNMLELLEEMPNGVPPEKVKSYIYQLIKAIHWC
HKNDIVHRDIKPENLLISHNDVLKLCDFGFARQLSEGNNAQYTEYVATRWYRSPELLLGAPYG
KSVDMWSVGCILGELSDGQPLFPGESEIDQLETIQKVLGPLPSEQMKLFYSNPREHGLREPAV
NHPQSLERRYLGILNSVLLDLMKNLLKLDPADRYLTEQCLNHPTFQTQRLLDRSPSRSAKRKP
YHVESSTLSNRNQAGKSTALQSHHRSNSKDIQQLSVGLPRADEGLPA [symbol] ESFLNGNLAGASLSP
LHTKTYQASSQPGSTSKDLTNNNIPHLLSPKEAKSKTEFDFNIDPKPSEGPGTKYLKSNSRSQ
QNRHSFMESSQSKAGTLQPNEKQSRHSYIDTIPQSSRSPSYRTKAKSHGALSDSKSVSQLSEA
RAQIAEPSTSRYFPSSCLDLNSPTSPTPTRHSDTRTLLSPSGRNNRNEGTLDSRRTTTRHSKT
MEELKLPEHMDSSHSHSLSAPHESFSYGLGYTSPFSSQQRPHRHSMYVTRDKVRAKGLDGSLS
IGQGMAARANSLQLLSPQPGEQLPPEMTVARSSVKETSREGTSSFHTRQKSEGGVYHDPHSDD
GTAPKENRHLYNDPVPRRVGSFYRVPSPRPDNSFHEN [symbol] VSTRVSSLPSESSSGT [symbol] HSKRQPAF
DPWKSPEQISHSEQLKEKEKQGFFRSMKKKKKKSQTVPNSDSPDLLTLQKSIHSASTPSSRPK
EWRPEKISDLQTQSQPLKSLRKLLHLSSASNHPASSDPRFQPLTAQQTKNSFSEIRIHPLSQA
SGGSSNIRQEPAPKGRPALQLPGQMDPGWHVSSVTRSATEGPSYSEQLGAKSGPNGHPYQRTQ
RSRMPNLNDLKETAL
CDKL5₁₀₇ Variant 1-7, 9-10NQ
SEQ ID NO: 23
MKIPNIGNVMNKFEILGVVGEGAYGVVLKCRHKETHEIVAIKKFKDSEENEEVKETTLRELKM
LRTLKQENIVELKEAFRRRGKLYLVFEYVEKNMLELLEEMPNGVPPEKVKSYIYQLIKAIHWC
HKNDIVHRDIKPENLLISHNDVLKLCDFGFARQLSEGNNAQYTEYVATRWYRSPELLLGAPYG
KSVDMWSVGCILGELSDGQPLFPGESEIDQLFTIQKVLGPLPSEQMKLFYSNPRFHGLRFPAV
NHPQSLERRYLGILNSVLLDLMKNLLKLDPADRYLTEQCLNHPTFQTQRLLDRSPSRSAKRKP
YHVESSTLSNRNQAGKSTALQSHHRSNSKDIQQLSVGLPRADEGLPA [symbol] ESFLNGNLAGASLSP
LHTKTYQASSQPGSTSKDLTNNNIPHLLSPKEAKSKTEFDFNIDPKPSEGPGTKYLKSNSRSQ
QNRHSFMESSQSKAGTLQPNEKQSRHSYIDTIPQSSRSPSYRTKAKSHGALSDSKSVSQLSEA
RAQIAEPSTSRYFPSSCLDLNSPTSPTPTRHSDTRTLLSPSGRNNRNEGTLDSRRTTTRHSKT
MEELKLPEHMDSSHSHSLSAPHESFSYGLGYTSPFSSQQRPHRHSMYVTRDKVRAKGLDGSLS
IGQGMAARANSLQLLSPQPGEQLPPEMTVARSSVKETSREGTSSFHTRQKSEGGVYHDPHSDD
GTAPKENRHLYNDPVPRRVGSFYRVPSPRPDNSFHEN [symbol] VSTRVSSLPSESSSGT [symbol] HSKRQPAF
DPWKSPEQISHSEQLKEKEKQGFFRSMKKKKKKSQTVPNSDSPDLLTLQKSIHSASTPSSRPK
EWRPEKISDLQTQSQPLKSLRKLLHLSSASNHPASSDPRFQPLTAQQTKNSFSEIRIHPLSQA
SGGSSNIRQEPAPKGRPALQLPGQMDPGWHVSSVTRSATEGPSYSEQLGAKSGPNGHPYQRTQ
RSRMPNLNDLKETAL
CDKL5₁₀₇ Variant 1-8, 10NQ
SEQ ID NO: 24
MKIPNIGNVMNKFEILGVVGEGAYGVVLKCRHKETHEIVAIKKFKDSEENEEVKETTLRELKM
LRTLKQENIVELKEAFRRRGKLYLVFEYVEKNMLELLEEMPNGVPPEKVKSYIYQLIKAIHWC
HKNDIVHRDIKPENLLISHNDVLKLCDFGFARQLSEGNNAQYTEYVATRWYRSPELLLGAPYG
KSVDMWSVGCILGELSDGQPLFPGESEIDQLFTIQKVLGPLPSEQMKLFYSNPRFHGLRFPAV
NHPQSLERRYLGILNSVLLDLMKNLLKLDPADRYLTEQCLNHPTFQTQRLLDRSPSRSAKRKP
YHVESSTLSNRNQAGKSTALQSHHRSNSKDIQQLSVGLPRADEGLPA [symbol] ESFLNGNLAGASLSP
LHTKTYQASSQPGSTSKDLTNNNIPHLLSPKEAKSKTEFDFNIDPKPSEGPGTKYLKSNSRSQ
QNRHSFMESSQSKAGTLQPNEKQSRHSYIDTIPQSSRSPSYRTKAKSHGALSDSKSVSQLSEA
RAQIAEPSTSRYFPSSCLDLNSPTSPTPTRHSDTRTLLSPSGRNNRNEGTLDSRRTTTRHSKT
MEELKLPEHMDSSHSHSLSAPHESFSYGLGYTSPFSSQQRPHRHSMYVTRDKVRAKGLDGSLS
IGQGMAARANSLQLLSPQPGEQLPPEMTVARSSVKETSREGTSSFHTRQKSEGGVYHDPHSDD
GTAPKENRHLYNDPVPRRVGSFYRVPSPRPDNSFHEN [symbol] VSTRVSSLPSESSSGT [symbol] HSKRQPAF
DPWKSPEQISHSEQLKEKEKQGFFRSMKKKKKKSQTVPNSDSPDLLTLQKSIHSASTPSSRPK
EWRPEKISDLQTQSQPLKSLRKLLHLSSASNHPASSDPRFQPLTAQQTKNSFSEIRIHPLSQA
SGGSSNIRQEPAPKGRPALQLPGQMDPGWHVSSVTRSATEGPSYSEQLGAKSGPNGHPYQRTQ
RSRMPNLNDLKETAL
CDKL5₁₀₇ Variant 1-9NQ
SEQ ID NO: 25
MKIPNIGNVMNKFEILGVVGEGAYGVVLKCRHKETHEIVAIKKFKDSEENEEVKETTLRELKM
LRTLKQENIVELKEAFRRRGKLYLVFEYVEKNMLELLEEMPNGVPPEKVKSYIYQLIKAIHWC
HKNDIVHRDIKPENLLISHNDVLKLCDFGFARQLSEGNNAQYTEYVATRWYRSPELLLGAPYG
KSVDMWSVGCILGELSDGQPLFPGESEIDQLFTIQKVLGPLPSEQMKLFYSNPRFHGLRFPAV
NHPQSLERRYLGILNSVLLDLMKNLLKLDPADRYLTEQCLNHPTFQTQRLLDRSPSRSAKRKP
YHVESSTLSNRNQAGKSTALQSHHRSNSKDIQQLSVGLPRADEGLPA [symbol] ESFLNGNLAGASLSP
LHTKTYQASSQPGSTSKDLTNNNIPHLLSPKEAKSKTEFDFNIDPKPSEGPGTKYLKSNSRSQ
QNRHSFMESSQSKAGTLQPNEKQSRHSYIDTIPQSSRSPSYRTKAKSHGALSDSKSVSQLSEA
RAQIAEPSTSRYFPSSCLDLNSPTSPTPTRHSDTRTLLSPSGRNNRNEGTLDSRRTTTRHSKT
MEELKLPEHMDSSHSHSLSAPHESFSYGLGYTSPFSSQQRPHRHSMYVTRDKVRAKGLDGSLS
IGQGMAARANSLQLLSPQPGEQLPPEMTVARSSVKETSREGTSSFHTRQKSEGGVYHDPHSDD
GTAPKENRHLYNDPVPRRVGSFYRVPSPRPDNSFHEN [symbol] VSTRVSSLPSESSSGT [symbol] HSKRQPAF
DPWKSPEQISHSEQLKEKEKQGFFRSMKKKKKKSQTVPNSDSPDLLTLQKSIHSASTPSSRPK
EWRPEKISDLQTQSQPLKSLRKLLHLSSASNHPASSDPRFQPLTAQQTKNSFSEIRIHPLSQA
SGGSSNIRQEPAPKGRPALQLPGQMDPGWHVSSVTRSATEGPSYSEQLGAKSGPNGHPYQRTQ
RSRMPNLNDLKETAL
CDKL5115 isoform polypeptide 1-1030 (full-length)
SEQ ID NO: 26
MKIPNIGNVMNKFEILGVVGEGAYGVVLKCRHKETHEIVAIKKFKDSEENEEVKETTLRELKM
LRTLKQENIVELKEAFRRRGKLYLVFEYVEKNMLELLEEMPNGVPPEKVKSYIYQLIKAIHWC
HKNDIVHRDIKPENLLISHNDVLKLCDFGFARNLSEGNNANYTEYVATRWYRSPELLLGAPYG
KSVDMWSVGCILGELSDGQPLFPGESEIDQLFTIQKVLGPLPSEQMKLFYSNPRFHGLRFPAV
NHPQSLERRYLGILNSVLLDLMKNLLKLDPADRYLTEQCLNHPTFQTQRLLDRSPSRSAKRKP
YHVESSTLSNRNQAGKSTALQSHHRSNSKDIQNLSVGLPRADEGLPANESFLNGNLAGASLSP
LHTKTYQASSQPGSTSKDLTNNNIPHLLSPKEAKSKTEFDFNIDPKPSEGPGTKYLKSNSRSQ
QNRHSFMESSQSKAGTLQPNEKQSRHSYIDTIPQSSRSPSYRTKAKSHGALSDSKSVSNLSEA
RAQIAEPSTSRYFPSSCLDLNSPTSPTPTRHSDTRTLLSPSGRNNRNEGTLDSRRTTTRHSKT
MEELKLPEHMDSSHSHSLSAPHESFSYGLGYTSPFSSQQRPHRHSMYVTRDKVRAKGLDGSLS
IGQGMAARANSLQLLSPQPGEQLPPEMTVARSSVKETSREGTSSFHTRQKSEGGVYHDPHSDD
GTAPKENRHLYNDPVPRRVGSFYRVPSPRPDNSFHENNVSTRVSSLPSESSSGTNHSKRQPAF
DPWKSPENISHSEQLKEKEKQGFFRSMKKKKKKSQTVPNSDSPDLLTLQKSIHSASTPSSRPK
EWRPEKISDLQTQSQPLKSLRKLLHLSSASNHPASSDPRFQPLTAQQTKNSFSEIRIHPLSQA
SGGSSNIRQEPAPKGRPALQLPDGGCDGRRQRHHSGPQDRRFMLRTTEQQGEYFCCGDPKKPH
TPCVPNRALHRPISSPAPYPVLQVRGTSMCPTLQVRGTDAFSCPTQQSGFSFFVRHVMREALI
HRAQVNQAALLTYHENAALTGK
AAV2 L-ITR
SEQ ID NO: 27
CCTGCAGGCAGCTGCGCGCTCGCTCGCTCACTGAGGCCGCCCGGGCAAAGCCCGGGCGTCGGG
CGACCTTTGGTCGCCCGGCCTCAGTGAGCGAGCGAGCGCGCAGAGAGGGAGTGGCCAACTCCA
TCACTAGGGGTTCCT
AAV2 R-ITR
SEQ ID NO: 28
AGGAACCCCTAGTGATGGAGTTGGCCACTCCCTCTCTGCGCGCTCGCTCGCTCACTGAGGCCG
GGCGACCAAAGGTCGCCCGACGCCCGGGCTTTGCCCGGGCGGCCTCAGTGAGCGAGCGAGCGC
GCAGCTGCCTGCAGG
CBh
SEQ ID NO: 29
TTAATAGTAATCAATTACGGGGTCATTAGTTCATAGCCCATATATGGAGTTCCGCGTTACATA
ACTTACGGTAAATGGCCCGCCTGGCTGACCGCCCAACGACCCCCGCCCATTGACGTCAATAAT
GACGTATGTTCCCATAGTAACGCCAATAGGGACTTTCCATTGACGTCAATGGGTGGAGTATTT
ACGGTAAACTGCCCACTTGGCAGTACATCAAGTGTATCATATGCCAAGTACGCCCCCTATTGA
CGTCAATGACGGTAAATGGCCCGCCTGGCATTATGCCCAGTACATGACCTTACGGGACTTTCC
TACTTGGCAGTACATCTCCACGTTCTGCTTCACTCTCCCCATCTCCCCCCCCTCCCCACCCCC
AATTTTGTATTTATTTATTTTTTAATTATTTTGTGCAGCGATGGGGGCGGGGGGGGGGGGGGC
GCGCGCCAGGCGGGGCGGGGCGGGGCGAGGGGCGGGGCGGGGCGAGGCGGAGAGGTGCGGCGG
CAGCCAATCAGAGCGGCGCGCTCCGAAAGTTTCCTTTTATGGCGAGGCGGCGGCGGCGGCGGC
CCTATAAAAAGCGAAGCGCGCGGCGGGGAGTCGCTGCGTTGCCTTCGCCCCGTGCCCCGCTCC
GCGCCGCCTCGCGCCGCCCGCCCCGGCTCTGACTGACCGCGTTACTCCCACAGGTGAGCGGGC
GGGACGGCCCTTCTCCTCCGGGCTGTAATTAGCAAGAGGTAAGGGTTTAAGGGATGGTTGGTT
GGTGGGGTATTAATGTTTAATTACCTGTTTTACAGGCCTGAAATCACTTGGTTTTAGGTTGG
hSyn1
SEQ ID NO: 30
ACTACAAACCGAGTATCTGCAGAGGGCCCTGCGTATGAGTGCAAGTGGGTTTTAGGACCAGGA
TGAGGCGGGGTGGGGGTGCCTACCTGACGACCGACCCCGACCCACTGGACAAGCACCCAACCC
CCATTCCCCAAATTGCGCATCCCCTATCAGAGAGGGGGAGGGGAAACAGGATGCGGCGAGGCG
CGTGCGCACTGCCAGCTTCAGCACCGCGGACAGTGCCTTCGCCCCCGCCTGGCGGCGCGCGCC
ACCGCCGCCTCAGCACTGAAGGCGCGCTGACGTCACTCGCCGGTCCCCCGCAAACTCCCCTTC
CCGGCCACCTTGGTCGCGTCCGCGCCGCCGCCGGCCCAGCCGGACCGCACCACGCGAGGCGCG
AGATAGGGGGGCACGGGCGCGACCATCTGCGCTGCGGCGCCGGCGACTCAGCGCTGCCTCAGT
CTGCGGTGGGCAGCGGAGGAGTCGTGTCGTGCCTGAGAGCGCAGCTGTGCTCCTGGGCACCGC
GCAGTCCGCCCCCGCGGCTCCTGGCCAGACCACCCCTAGGACCCCCTGCCCCAAGTCGCAGCC
TTCGA
TAT28 CPP
SEQ ID NO: 31
DAAQPARRARRTKLAAYGRKKRRQRRR
TATκ28 CPP
SEQ ID NO: 32
DAAQPARRARRTKLAAYARKAARQARA
TAT11 CPP
SEQ ID NO: 33
YGRKKRRQRRR
TATκ11 CPP
SEQ ID NO: 34
YARKAARQARA
Transportan CPP
SEQ ID NO: 35
AGYLLGKINLKALAALAKKIL
Antennapedia CPP
SEQ ID NO: 36
RQIKIWFQNRRMKWKK
P97 CPP
SEQ ID NO: 37
DSSHAFTLDELR
MBiP
SEQ ID NO: 38
MKLSLVAAMLLLLSLVAAMLLLLSAARA
MBiP2
SEQ ID NO: 39
MKLSLVAAMLLLLWVALLLLSAARA
MBiP3
SEQ ID NO: 40
MKLSLVAAMLLLLSLVALLLLSAARA
MBiP4
SEQ ID NO: 41
MKLSLVAAMLLLLALVALLLLSAARA
Murine Igκ
SEQ ID NO: 42
METDTLLLWVLLLWVPGSTG
MBip_Tκ28p_107_3xFlagHis_cho-opt in pOptiVec
SEQ ID NO: 43
MKLSLVAAMLLLLSLVAAMLLLLSAARAGDAAQPARRARRTKLAAYARKAARQARAGGGGSKI
PNIGNVMNKFEILGVVGEGAYGVVLKCRHKETHEIVAIKKFKDSEENEEVKETTLRELKMLRT
LKQENIVELKEAFRRRGKLYLVFEYVEKNMLELLEEMPNGVPPEKVKSYIYQLIKAIHWCHKN
DIVHRDIKPENLLISHNDVLKLCDFGFARNLSEGNNANYTEYVATRWYRSPELLLGAPYGKSV
DMWSVGCILGELSDGQPLFPGESEIDQLFTIQKVLGPLPSEQMKLFYSNPRFHGLRFPAVNHP
QSLERRYLGILNSVLLDLMKNLLKLDPADRYLTEQCLNHPTFQTQRLLDRSPSRSAKRKPYHV
ESSTLSNRNQAGKSTALQSHHRSNSKDIQNLSVGLPRADEGLPANESFLNGNLAGASLSPLHT
KTYQASSQPGSTSKDLTNNNIPHLLSPKEAKSKTEFDFNIDPKPSEGPGTKYLKSNSRSQQNR
HSFMESSQSKAGTLQPNEKQSRHSYIDTIPQSSRSPSYRTKAKSHGALSDSKSVSNLSEARAQ
IAEPSTSRYFPSSCLDLNSPTSPTPTRHSDTRTLLSPSGRNNRNEGTLDSRRTTTRHSKTMEE
LKLPEHMDSSHSHSLSAPHESFSYGLGYTSPFSSQQRPHRHSMYVTRDKVRAKGLDGSLSIGQ
GMAARANSLQLLSPQPGEQLPPEMTVARSSVKETSREGTSSFHTRQKSEGGVYHDPHSDDGTA
PKENRHLYNDPVPRRVGSFYRVPSPRPDNSFHENNVSTRVSSLPSESSSGTNHSKRQPAFDPW
KSPENISHSEQLKEKEKQGFFRSMKKKKKKSQTVPNSDSPDLLTLQKSIHSASTPSSRPKEWR
PEKISDLQTQSQPLKSLRKLLHLSSASNHPASSDPRFQPLTAQQTKNSFSEIRIHPLSQASGG
SSNIRQEPAPKGRPALQLPGQMDPGWHVSSVTRSATEGPSYSEQLGAKSGPNGHPYNRTNRSR

[chemical structure]

Igκ_Tκ28p_107_3xFlagHis_cho-opt in pOptiVec
SEQ ID NO: 44
METDTLLLWVLLLWVPGSTGGDAAQPARRARRTKLAAYARKAARQARAGGGGSKIPNIGNVMN
KFEILGVVGEGAYGVVLKCRHKETHEIVAIKKFKDSEENEEVKETTLRELKMLRTLKQENIVE
LKEAFRRRGKLYLVFEYVEKNMLELLEEMPNGVPPEKVKSYIYQLIKAIHWCHKNDIVHRDIK
PENLLISHNDVLKLCDFGFARNLSEGNNANYTEYVATRWYRSPELLLGAPYGKSVDMWSVGCI
LGELSDGQPLFPGESEIDQLFTIQKVLGPLPSEQMKLFYSNPRFHGLRFPAVNHPQSLERRYL
GILNSVLLDLMKNLLKLDPADRYLTEQCLNHPTFQTQRLLDRSPSRSAKRKPYHVESSTLSNR
NQAGKSTALQSHHRSNSKDIQNLSVGLPRADEGLPANESFLNGNLAGASLSPLHTKTYQASSQ
PGSTSKDLTNNNIPHLLSPKEAKSKTEFDFNIDPKPSEGPGTKYLKSNSRSQQNRHSFMESSQ
SKAGTLQPNEKQSRHSYIDTIPQSSRSPSYRTKAKSHGALSDSKSVSNLSEARAQIAEPSTSR
YFPSSCLDLNSPTSPTPTRHSDTRTLLSPSGRNNRNEGTLDSRRTTTRHSKTMEELKLPEHMD
SSHSHSLSAPHESFSYGLGYTSPFSSQQRPHRHSMYVTRDKVRAKGLDGSLSIGQGMAARANS
LQLLSPQPGEQLPPEMTVARSSVKETSREGTSSFHTRQKSEGGVYHDPHSDDGTAPKENRHLY
NDPVPRRVGSFYRVPSPRPDNSFHENNVSTRVSSLPSESSSGTNHSKRQPAFDPWKSPENISH
SEQLKEKEKQGFFRSMKKKKKKSQTVPNSDSPDLLTLQKSIHSASTPSSRPKEWRPEKISDLQ
TQSQPLKSLRKLLHLSSASNHPASSDPRFQPLTAQQTKNSFSEIRIHPLSQASGGSSNIRQEP
APKGRPALQLPGQMDPGWHVSSVTRSATEGPSYSEQLGAKSGPNGHPYNRTNRSRMPNLNDLK

[chemical structure]

MBiP_Tκ28p_115_3xFlagHis_cho-opt in pOptiVec
SEQ ID NO: 45
MKLSLVAAMLLLLSLVAAMLLLLSAARAGDAAQPARRARRTKLAAYARKAARQARAGGGGSKI
PNIGNVMNKFEILGVVGEGAYGVVLKCRHKETHEIVAIKKFKDSEENEEVKETTLRELKMLRT
LKQENIVELKEAFRRRGKLYLVFEYVEKNMLELLEEMPNGVPPEKVKSYIYQLIKAIHWCHKN
DIVHRDIKPENLLISHNDVLKLCDFGFARNLSEGNNANYTEYVATRWYRSPELLLGAPYGKSV
DMWSVGCILGELSDGQPLFPGESEIDQLFTIQKVLGPLPSEQMKLFYSNPRFHGLRFPAVNHP
QSLERRYLGILNSVLLDLMKNLLKLDPADRYLTEQCLNHPTFQTQRLLDRSPSRSAKRKPYHV
ESSTLSNRNQAGKSTALQSHHRSNSKDIQNLSVGLPRADEGLPANESFLNGNLAGASLSPLHT
KTYQASSQPGSTSKDLTNNNIPHLLSPKEAKSKTEFDFNIDPKPSEGPGTKYLKSNSRSQQNR
HSFMESSQSKAGTLQPNEKQSRHSYIDTIPQSSRSPSYRTKAKSHGALSDSKSVSNLSEARAQ
IAEPSTSRYFPSSCLDLNSPTSPTPTRHSDTRTLLSPSGRNNRNEGTLDSRRTTTRHSKTMEE
LKLPEHMDSSHSHSLSAPHESFSYGLGYTSPFSSQQRPHRHSMYVTRDKVRAKGLDGSLSIGQ
GMAARANSLQLLSPQPGEQLPPEMTVARSSVKETSREGTSSFHTRQKSEGGVYHDPHSDDGTA
PKENRHLYNDPVPRRVGSFYRVPSPRPDNSFHENNVSTRVSSLPSESSSGTNHSKRQPAFDPW
KSPENISHSEQLKEKEKQGFFRSMKKKKKKSQTVPNSDSPDLLTLQKSIHSASTPSSRPKEWR
PEKISDLQTQSQPLKSLRKLLHLSSASNHPASSDPRFQPLTAQQTKNSFSEIRIHPLSQASGG
SSNIRQEPAPKGRPALQLPDGGCDGRRQRHHSGPQDRRFMLRTTEQQGEYFCCGDPKKPHTPC
VPNRALHRPISSPAPYPVLQVRGTSMCPTLQVRGTDAFSCPTQQSGFSFFVRHVMREALIHRA

[chemical structure]

Igκ_Tκ28p_115_3xFlagHis_cho-opt in pOptiVec
SEQ ID NO: 46
METDTLLLWVLLLWVPGSTGGDAAQPARRARRTKLAAYARKAARQARAGGGGSKIPNIGNVMN
KFEILGVVGEGAYGVVLKCRHKETHEIVAIKKFKDSEENEEVKETTLRELKMLRTLKQENIVE
LKEAFRRRGKLYLVFEYVEKNMLELLEEMPNGVPPEKVKSYIYQLIKAIHWCHKNDIVHRDIK
PENLLISHNDVLKLCDFGFARNLSEGNNANYTEYVATRWYRSPELLLGAPYGKSVDMWSVGCI
LGELSDGQPLFPGESEIDQLFTIQKVLGPLPSEQMKLFYSNPRFHGLRFPAVNHPQSLERRYL
GILNSVLLDLMKNLLKLDPADRYLTEQCLNHPTFQTQRLLDRSPSRSAKRKPYHVESSTLSNR
NQAGKSTALQSHHRSNSKDIQNLSVGLPRADEGLPANESFLNGNLAGASLSPLHTKTYQASSQ
PGSTSKDLTNNNIPHLLSPKEAKSKTEFDFNIDPKPSEGPGTKYLKSNSRSQQNRHSFMESSQ
SKAGTLQPNEKQSRHSYIDTIPQSSRSPSYRTKAKSHGALSDSKSVSNLSEARAQIAEPSTSR
YFPSSCLDLNSPTSPTPTRHSDTRTLLSPSGRNNRNEGTLDSRRTTTRHSKTMEELKLPEHMD
SSHSHSLSAPHESFSYGLGYTSPFSSQQRPHRHSMYVTRDKVRAKGLDGSLSIGQGMAARANS
LQLLSPQPGEQLPPEMTVARSSVKETSREGTSSFHTRQKSEGGVYHDPHSDDGTAPKENRHLY
NDPVPRRVGSFYRVPSPRPDNSFHENNVSTRVSSLPSESSSGTNHSKRQPAFDPWKSPENISH
SEQLKEKEKQGFFRSMKKKKKKSQTVPNSDSPDLLTLQKSIHSASTPSSRPKEWRPEKISDLQ
TQSQPLKSLRKLLHLSSASNHPASSDPRFQPLTAQQTKNSFSEIRIHPLSQASGGSSNIRQEP
APKGRPALQLPDGGCDGRRQRHHSGPQDRRFMLRTTEQQGEYFCCGDPKKPHTPCVPNRALHR
PISSPAPYPVLQVRGTSMCPTLQVRGTDAFSCPTQQSGFSFFVRHVMREALIHRAQVNQAALL

[chemical structure]

Tκ28p_107_3xFlagHis_cho-opt in pOptiVec
SEQ ID NO: 47
MGDAAQPARRARRTKLAAYARKAARQARAGGGGSKIPNIGNVMNKFEILGVVGEGAYGVVLKC
RHKETHEIVAIKKFKDSEENEEVKETTLRELKMLRTLKQENIVELKEAFRRRGKLYLVFEYVE
KNMLELLEEMPNGVPPEKVKSYIYQLIKAIHWCHKNDIVHRDIKPENLLISHNDVLKLCDFGF
ARNLSEGNNANYTEYVATRWYRSPELLLGAPYGKSVDMWSVGCILGELSDGQPLFPGESEIDQ
LFTIQKVLGPLPSEQMKLFYSNPRFHGLRFPAVNHPQSLERRYLGILNSVLLDLMKNLLKLDP
ADRYLTEQCLNHPTFQTQRLLDRSPSRSAKRKPYHVESSTLSNRNQAGKSTALQSHHRSNSKD
IQNLSVGLPRADEGLPANESFLNGNLAGASLSPLHTKTYQASSQPGSTSKDLTNNNIPHLLSP
KEAKSKTEFDFNIDPKPSEGPGTKYLKSNSRSQQNRHSFMESSQSKAGTLQPNEKQSRHSYID
TIPQSSRSPSYRTKAKSHGALSDSKSVSNLSEARAQIAEPSTSRYFPSSCLDLNSPTSPTPTR
HSDTRTLLSPSGRNNRNEGTLDSRRTTTRHSKTMEELKLPEHMDSSHSHSLSAPHESFSYGLG
YTSPFSSQQRPHRHSMYVTRDKVRAKGLDGSLSIGQGMAARANSLQLLSPQPGEQLPPEMTVA
RSSVKETSREGTSSFHTRQKSEGGVYHDPHSDDGTAPKENRHLYNDPVPRRVGSFYRVPSPRP
DNSFHENNVSTRVSSLPSESSSGTNHSKRQPAFDPWKSPENISHSEQLKEKEKQGFFRSMKKK
KKKSQTVPNSDSPDLLTLQKSIHSASTPSSRPKEWRPEKISDLQTQSQPLKSLRKLLHLSSAS
NHPASSDPRFQPLTAQQTKNSFSEIRIHPLSQASGGSSNIRQEPAPKGRPALQLPGQMDPGWH

[chemical structure]

DHDGDYKDHDIDYKDDDDKDGAPHHHHHH*
Tκ28p_107_3xFlagHis_ecoli-opt in pEX-1
SEQ ID NO: 48
MGDAAQPARRARRTKLAAYARKAARQARAGGGGSKIPNIGNVMNKFEILGVVGEGAYGVVLKC
RHKETHEIVAIKKFKDSEENEEVKETTLRELKMLRTLKQENIVELKEAFRRRGKLYLVFEYVE
KNMLELLEEMPNGVPPEKVKSYIYQLIKAIHWCHKNDIVHRDIKPENLLISHNDVLKLCDFGF
ARNLSEGNNANYTEYVATRWYRSPELLLGAPYGKSVDMWSVGCILGELSDGQPLFPGESEIDQ
LFTIQKVLGPLPSEQMKLFYSNPRFHGLRFPAVNHPQSLERRYLGILNSVLLDLMKNLLKLDP
ADRYLTEQCLNHPTFQTQRLLDRSPSRSAKRKPYHVESSTLSNRNQAGKSTALQSHHRSNSKD
IQNLSVGLPRADEGLPANESFLNGNLAGASLSPLHTKTYQASSQPGSTSKDLTNNNIPHLLSP
KEAKSKTEFDFNIDPKPSEGPGTKYLKSNSRSQQNRHSFMESSQSKAGTLQPNEKQSRHSYID
TIPQSSRSPSYRTKAKSHGALSDSKSVSNLSEARAQIAEPSTSRYFPSSCLDLNSPTSPTPTR
HSDTRTLLSPSGRNNRNEGTLDSRRTTTRHSKTMEELKLPEHMDSSHSHSLSAPHESFSYGLG
YTSPFSSQQRPHRHSMYVTRDKVRAKGLDGSLSIGQGMAARANSLQLLSPQPGEQLPPEMTVA
RSSVKETSREGTSSFHTRQKSEGGVYHDPHSDDGTAPKENRHLYNDPVPRRVGSFYRVPSPRP
DNSFHENNVSTRVSSLPSESSSGTNHSKRQPAFDPWKSPENISHSEQLKEKEKQGFFRSMKKK
KKKSQTVPNSDSPDLLTLQKSIHSASTPSSRPKEWRPEKISDLQTQSQPLKSLRKLLHLSSAS
NHPASSDPRFQPLTAQQTKNSFSEIRIHPLSQASGGSSNIRQEPAPKGRPALQLPGQMDPGWH

[chemical structure]

DHDGDYKDHDIDYKDDDDKDGAPHHHHHH*
Δ853-960 in pEX-1
SEQ ID NO: 49
MGDAAQPARRARRTKLAAYARKAARQARAGGGGSKIPNIGNVMNKFEILGVVGEGAYGVVLKC
RHKETHEIVAIKKFKDSEENEEVKETTLRELKMLRTLKQENIVELKEAFRRRGKLYLVFEYVE
KNMLELLEEMPNGVPPEKVKSYIYQLIKAIHWCHKNDIVHRDIKPENLLISHNDVLKLCDFGF
ARNLSEGNNANYTEYVATRWYRSPELLLGAPYGKSVDMWSVGCILGELSDGQPLFPGESEIDQ
LFTIQKVLGPLPSEQMKLFYSNPRFHGLRFPAVNHPQSLERRYLGILNSVLLDLMKNLLKLDP
ADRYLTEQCLNHPTFQTQRLLDRSPSRSAKRKPYHVESSTLSNRNQAGKSTALQSHHRSNSKD
IQNLSVGLPRADEGLPANESFLNGNLAGASLSPLHTKTYQASSQPGSTSKDLTNNNIPHLLSP
KEAKSKTEFDFNIDPKPSEGPGTKYLKSNSRSQQNRHSFMESSQSKAGTLQPNEKQSRHSYID
TIPQSSRSPSYRTKAKSHGALSDSKSVSNLSEARAQIAEPSTSRYFPSSCLDLNSPTSPTPTR
HSDTRTLLSPSGRNNRNEGTLDSRRTTTRHSKTMEELKLPEHMDSSHSHSLSAPHESFSYGLG
YTSPFSSQQRPHRHSMYVTRDKVRAKGLDGSLSIGQGMAARANSLQLLSPQPGEQLPPEMTVA
RSSVKETSREGTSSFHTRQKSEGGVYHDPHSDDGTAPKENRHLYNDPVPRRVGSFYRVPSPRP
DNSFHENNVSTRVSSLPSESSSGTNHSKRQPAFDPWKSPENISHSEQLKEKEKQGFFRSMKKK
KKKSQTVPNSDSPDLLTLQKSIHSASTPSSRPKEWRPEKISDLQTQSQPLKSLRKLLHLSSAS

[chemical structure]

Δ745-960 in pEX-1
SEQ ID NO: 50
MGDAAQPARRARRTKLAAYARKAARQARAGGGGSKIPNIGNVMNKFEILGVVGEGAYGVVLKC
RHKETHEIVAIKKFKDSEENEEVKETTLRELKMLRTLKQENIVELKEAFRRRGKLYLVFEYVE
KNMLELLEEMPNGVPPEKVKSYIYQLIKAIHWCHKNDIVHRDIKPENLLISHNDVLKLCDFGF
ARNLSEGNNANYTEYVATRWYRSPELLLGAPYGKSVDMWSVGCILGELSDGQPLFPGESEIDQ
LFTIQKVLGPLPSEQMKLFYSNPRFHGLRFPAVNHPQSLERRYLGILNSVLLDLMKNLLKLDP
ADRYLTEQCLNHPTFQTQRLLDRSPSRSAKRKPYHVESSTLSNRNQAGKSTALQSHHRSNSKD
IQNLSVGLPRADEGLPANESFLNGNLAGASLSPLHTKTYQASSQPGSTSKDLTNNNIPHLLSP
KEAKSKTEFDFNIDPKPSEGPGTKYLKSNSRSQQNRHSFMESSQSKAGTLQPNEKQSRHSYID
TIPQSSRSPSYRTKAKSHGALSDSKSVSNLSEARAQIAEPSTSRYFPSSCLDLNSPTSPTPTR
HSDTRTLLSPSGRNNRNEGTLDSRRTTTRHSKTMEELKLPEHMDSSHSHSLSAPHESFSYGLG
YTSPFSSQQRPHRHSMYVTRDKVRAKGLDGSLSIGQGMAARANSLQLLSPQPGEQLPPEMTVA
RSSVKETSREGTSSFHTRQKSEGGVYHDPHSDDGTAPKENRHLYNDPVPRRVGSFYRVPSPRP

[chemical structure]

HH*
Δ637-960 in pEX-1
SEQ ID NO: 51
MGDAAQPARRARRTKLAAYARKAARQARAGGGGSKIPNIGNVMNKFEILGVVGEGAYGVVLKC
RHKETHEIVAIKKFKDSEENEEVKETTLRELKMLRTLKQENIVELKEAFRRRGKLYLVFEYVE
KNMLELLEEMPNGVPPEKVKSYIYQLIKAIHWCHKNDIVHRDIKPENLLISHNDVLKLCDFGF
ARNLSEGNNANYTEYVATRWYRSPELLLGAPYGKSVDMWSVGCILGELSDGQPLFPGESEIDQ
LFTIQKVLGPLPSEQMKLFYSNPRFHGLRFPAVNHPQSLERRYLGILNSVLLDLMKNLLKLDP
ADRYLTEQCLNHPTFQTQRLLDRSPSRSAKRKPYHVESSTLSNRNQAGKSTALQSHHRSNSKD
IQNLSVGLPRADEGLPANESFLNGNLAGASLSPLHTKTYQASSQPGSTSKDLTNNNIPHLLSP
KEAKSKTEFDFNIDPKPSEGPGTKYLKSNSRSQQNRHSFMESSQSKAGTLQPNEKQSRHSYID
TIPQSSRSPSYRTKAKSHGALSDSKSVSNLSEARAQIAEPSTSRYFPSSCLDLNSPTSPTPTR
HSDTRTLLSPSGRNNRNEGTLDSRRTTTRHSKTMEELKLPEHMDSSHSHSLSAPHESFSYGLG

[chemical structure]

[chemical structure]


Δ529-960 in pEX-1
SEQ ID NO: 52
MGDAAQPARRARRTKLAAYARKAARQARAGGGGSKIPNIGNVMNKFEILGVVGEGAYGVVLKC
RHKETHEIVAIKKFKDSEENEEVKETTLRELKMLRTLKQENIVELKEAFRRRGKLYLVFEYVE
KNMLELLEEMPNGVPPEKVKSYIYQLIKAIHWCHKNDIVHRDIKPENLLISHNDVLKLCDFGF
ARNLSEGNNANYTEYVATRWYRSPELLLGAPYGKSVDMWSVGCILGELSDGQPLFPGESEIDQ
LFTIQKVLGPLPSEQMKLFYSNPRFHGLRFPAVNHPQSLERRYLGILNSVLLDLMKNLLKLDP
ADRYLTEQCLNHPTFQTQRLLDRSPSRSAKRKPYHVESSTLSNRNQAGKSTALQSHHRSNSKD
IQNLSVGLPRADEGLPANESFLNGNLAGASLSPLHTKTYQASSQPGSTSKDLTNNNIPHLLSP
KEAKSKTEFDFNIDPKPSEGPGTKYLKSNSRSQQNRHSFMESSQSKAGTLQPNEKQSRHSYID

[chemical structure]

[chemical structure]


Δ421-960 in pEX-1
SEQ ID NO: 53
MGDAAQPARRARRTKLAAYARKAARQARAGGGGSKIPNIGNVMNKFEILGVVGEGAYGVVLKC
RHKETHEIVAIKKFKDSEENEEVKETTLRELKMLRTLKQENIVELKEAFRRRGKLYLVFEYVE
KNMLELLEEMPNGVPPEKVKSYIYQLIKAIHWCHKNDIVHRDIKPENLLISHNDVLKLCDFGF
ARNLSEGNNANYTEYVATRWYRSPELLLGAPYGKSVDMWSVGCILGELSDGQPLFPGESEIDQ
LFTIQKVLGPLPSEQMKLFYSNPRFHGLRFPAVNHPQSLERRYLGILNSVLLDLMKNLLKLDP
ADRYLTEQCLNHPTFQTQRLLDRSPSRSAKRKPYHVESSTLSNRNQAGKSTALQSHHRSNSKD
IQNLSVGLPRADEGLPANESFLNGNLAGASLSPLHTKTYQASSQPGSTSKDLTNNNIPHLLSP

[chemical structure]

Δ315-960 in pEX-1
SEQ ID NO: 54
MGDAAQPARRARRTKLAAYARKAARQARAGGGGSKIPNIGNVMNKFEILGVVGEGAYGVVLKC
RHKETHEIVAIKKFKDSEENEEVKETTLRELKMLRTLKQENIVELKEAFRRRGKLYLVFEYVE
KNMLELLEEMPNGVPPEKVKSYIYQLIKAIHWCHKNDIVHRDIKPENLLISHNDVLKLCDFGF
ARNLSEGNNANYTEYVATRWYRSPELLLGAPYGKSVDMWSVGCILGELSDGQPLFPGESEIDQ
LFTIQKVLGPLPSEQMKLFYSNPRFHGLRFPAVNHPQSLERRYLGILNSVLLDLMKNLLKLDP

[chemical structure]

[chemical structure]


Δ315-420 in pEX-1
SEQ ID NO: 55
MGDAAQPARRARRTKLAAYARKAARQARAGGGGSKIPNIGNVMNKFEILGVVGEGAYGVVLKC
RHKETHEIVAIKKFKDSEENEEVKETTLRELKMLRTLKQENIVELKEAFRRRGKLYLVFEYVE
KNMLELLEEMPNGVPPEKVKSYIYQLIKAIHWCHKNDIVHRDIKPENLLISHNDVLKLCDFGF
ARNLSEGNNANYTEYVATRWYRSPELLLGAPYGKSVDMWSVGCILGELSDGQPLFPGESEIDQ
LFTIQKVLGPLPSEQMKLFYSNPRFHGLRFPAVNHPQSLERRYLGILNSVLLDLMKNLLKLDP
ADRYLTEQCLNHPTFQTQRLLDRSPSRSAKRKIDPKPSEGPGTKYLKSNSRSQQNRHSFMESS
QSKAGTLQPNEKQSRHSYIDTIPQSSRSPSYRTKAKSHGALSDSKSVSNLSEARAQIAEPSTS
RYFPSSCLDLNSPTSPTPTRHSDTRTLLSPSGRNNRNEGTLDSRRTTTRHSKTMEELKLPEHM
DSSHSHSLSAPHESFSYGLGYTSPFSSQQRPHRHSMYVTRDKVRAKGLDGSLSIGQGMAARAN
SLQLLSPQPGEQLPPEMTVARSSVKETSREGTSSFHTRQKSEGGVYHDPHSDDGTAPKENRHL
YNDPVPRRVGSFYRVPSPRPDNSFHENNVSTRVSSLPSESSSGTNHSKRQPAFDPWKSPENIS
HSEQLKEKEKQGFFRSMKKKKKKSQTVPNSDSPDLLTLQKSIHSASTPSSRPKEWRPEKISDL
QTQSQPLKSLRKLLHLSSASNHPASSDPRFQPLTAQQTKNSFSEIRIHPLSQASGGSSNIRQE
PAPKGRPALQLPGQMDPGWHVSSVTRSATEGPSYSEQLGAKSGPNGHPYNRTNRSRMPNLNDL

[chemical structure]

Δ315-528 in pEX-1
SEQ ID NO: 56
MGDAAQPARRARRTKLAAYARKAARQARAGGGGSKIPNIGNVMNKFEILGVVGEGAYGVVLKC
RHKETHEIVAIKKFKDSEENEEVKETTLRELKMLRTLKQENIVELKEAFRRRGKLYLVFEYVE
KNMLELLEEMPNGVPPEKVKSYIYQLIKAIHWCHKNDIVHRDIKPENLLISHNDVLKLCDFGF
ARNLSEGNNANYTEYVATRWYRSPELLLGAPYGKSVDMWSVGCILGELSDGQPLFPGESEIDQ
LFTIQKVLGPLPSEQMKLFYSNPRFHGLRFPAVNHPQSLERRYLGILNSVLLDLMKNLLKLDP
ADRYLTEQCLNHPTFQTQRLLDRSPSRSAKRKSPTPTRHSDTRTLLSPSGRNNRNEGTLDSRR
TTTRHSKTMEELKLPEHMDSSHSHSLSAPHESFSYGLGYTSPFSSQQRPHRHSMYVTRDKVRA
KGLDGSLSIGQGMAARANSLQLLSPQPGEQLPPEMTVARSSVKETSREGTSSFHTRQKSEGGV
YHDPHSDDGTAPKENRHLYNDPVPRRVGSFYRVPSPRPDNSFHENNVSTRVSSLPSESSSGTN
HSKRQPAFDPWKSPENISHSEQLKEKEKQGFFRSMKKKKKKSQTVPNSDSPDLLTLQKSIHSA
STPSSRPKEWRPEKISDLQTQSQPLKSLRKLLHLSSASNHPASSDPRFQPLTAQQTKNSFSEI
RIHPLSQASGGSSNIRQEPAPKGRPALQLPGQMDPGWHVSSVTRSATEGPSYSEQLGAKSGPN

[chemical structure]

HHHH*
Δ315-636 in pEX-1
SEQ ID NO: 57
MGDAAQPARRARRTKLAAYARKAARQARAGGGGSKIPNIGNVMNKFEILGVVGEGAYGVVLKC
RHKETHEIVAIKKFKDSEENEEVKETTLRELKMLRTLKQENIVELKEAFRRRGKLYLVFEYVE
KNMLELLEEMPNGVPPEKVKSYIYQLIKAIHWCHKNDIVHRDIKPENLLISHNDVLKLCDFGF
ARNLSEGNNANYTEYVATRWYRSPELLLGAPYGKSVDMWSVGCILGELSDGQPLFPGESEIDQ
LFTIQKVLGPLPSEQMKLFYSNPRFHGLRFPAVNHPQSLERRYLGILNSVLLDLMKNLLKLDP
ADRYLTEQCLNHPTFQTQRLLDRSPSRSAKRKARANSLQLLSPQPGEQLPPEMTVARSSVKET
SREGTSSFHTRQKSEGGVYHDPHSDDGTAPKENRHLYNDPVPRRVGSFYRVPSPRPDNSFHEN
NVSTRVSSLPSESSSGTNHSKRQPAFDPWKSPENISHSEQLKEKEKQGFFRSMKKKKKKSQTV
PNSDSPDLLTLQKSIHSASTPSSRPKEWRPEKISDLQTQSQPLKSLRKLLHLSSASNHPASSD
PRFQPLTAQQTKNSFSEIRIHPLSQASGGSSNIRQEPAPKGRPALQLPGQMDPGWHVSSVTRS

[chemical structure]

[chemical structure]


Δ315-744 in pEX-1
SEQ ID NO: 58
MGDAAQPARRARRTKLAAYARKAARQARAGGGGSKIPNIGNVMNKFEILGVVGEGAYGVVLKC
RHKETHEIVAIKKFKDSEENEEVKETTLRELKMLRTLKQENIVELKEAFRRRGKLYLVFEYVE
KNMLELLEEMPNGVPPEKVKSYIYQLIKAIHWCHKNDIVHRDIKPENLLISHNDVLKLCDFGF
ARNLSEGNNANYTEYVATRWYRSPELLLGAPYGKSVDMWSVGCILGELSDGQPLFPGESEIDQ
LFTIQKVLGPLPSEQMKLFYSNPRFHGLRFPAVNHPQSLERRYLGILNSVLLDLMKNLLKLDP
ADRYLTEQCLNHPTFQTQRLLDRSPSRSAKRKSGTNHSKRQPAFDPWKSPENISHSEQLKEKE
KQGFFRSMKKKKKKSQTVPNSDSPDLLTLQKSIHSASTPSSRPKEWRPEKISDLQTQSQPLKS
LRKLLHLSSASNHPASSDPRFQPLTAQQTKNSFSEIRIHPLSQASGGSSNIRQEPAPKGRPAL

[chemical structure]

[chemical structure]


Δ315-852 in pEX-1
SEQ ID NO: 59
MGDAAQPARRARRTKLAAYARKAARQARAGGGGSKIPNIGNVMNKFEILGVVGEGAYGVVLKC
RHKETHEIVAIKKFKDSEENEEVKETTLRELKMLRTLKQENIVELKEAFRRRGKLYLVFEYVE
KNMLELLEEMPNGVPPEKVKSYIYQLIKAIHWCHKNDIVHRDIKPENLLISHNDVLKLCDFGF
ARNLSEGNNANYTEYVATRWYRSPELLLGAPYGKSVDMWSVGCILGELSDGQPLFPGESEIDQ
LFTIQKVLGPLPSEQMKLFYSNPRFHGLRFPAVNHPQSLERRYLGILNSVLLDLMKNLLKLDP
ADRYLTEQCLNHPTFQTQRLLDRSPSRSAKRKASSDPRFQPLTAQQTKNSFSEIRIHPLSQAS
GGSSNIRQEPAPKGRPALQLPGQMDPGWHVSSVTRSATEGPSYSEQLGAKSGPNGHPYNRTNR

[chemical structure]

TT28p_107_3xFlagHis_ecoli-opt in pEX-1
SEQ ID NO: 60
MGDAAQPARRARRTKLAAYGRKKRRQRRRGGGGSKIPNIGNVMNKFEILGVVGEGAYGVVLKC
RHKETHEIVAIKKFKDSEENEEVKETTLRELKMLRTLKQENIVELKEAFRRRGKLYLVFEYVE
KNMLELLEEMPNGVPPEKVKSYIYQLIKAIHWCHKNDIVHRDIKPENLLISHNDVLKLCDFGF
ARNLSEGNNANYTEYVATRWYRSPELLLGAPYGKSVDMWSVGCILGELSDGQPLFPGESEIDQ
LFTIQKVLGPLPSEQMKLFYSNPRFHGLRFPAVNHPQSLERRYLGILNSVLLDLMKNLLKLDP
ADRYLTEQCLNHPTFQTQRLLDRSPSRSAKRKPYHVESSTLSNRNQAGKSTALQSHHRSNSKD
IQNLSVGLPRADEGLPANESFLNGNLAGASLSPLHTKTYQASSQPGSTSKDLTNNNIPHLLSP
KEAKSKTEFDFNIDPKPSEGPGTKYLKSNSRSQQNRHSFMESSQSKAGTLQPNEKQSRHSYID
TIPQSSRSPSYRTKAKSHGALSDSKSVSNLSEARAQIAEPSTSRYFPSSCLDLNSPTSPTPTR
HSDTRTLLSPSGRNNRNEGTLDSRRTTTRHSKTMEELKLPEHMDSSHSHSLSAPHESFSYGLG
YTSPFSSQQRPHRHSMYVTRDKVRAKGLDGSLSIGQGMAARANSLQLLSPQPGEQLPPEMTVA
RSSVKETSREGTSSFHTRQKSEGGVYHDPHSDDGTAPKENRHLYNDPVPRRVGSFYRVPSPRP
DNSFHENNVSTRVSSLPSESSSGTNHSKRQPAFDPWKSPENISHSEQLKEKEKQGFFRSMKKK
KKKSQTVPNSDSPDLLTLQKSIHSASTPSSRPKEWRPEKISDLQTQSQPLKSLRKLLHLSSAS
NHPASSDPRFQPLTAQQTKNSFSEIRIHPLSQASGGSSNIRQEPAPKGRPALQLPGQMDPGWH

[chemical structure]

DHDGDYKDHDIDYKDDDDKDGAPHHHHHH*
Tκ28p_eGFP_ecoli-opt_3xFlagHis in pEX-1
SEQ ID NO: 61
MGDAAQPARRARRTKLAAYARKAARQARAGGGGSVSKGEELFTGVVPILVELDGDVNGHKFSV
SGEGEGDATYGKLTLKFICTTGKLPVPWPTLVTTLTYGVQCFSRYPDHMKQHDFFKSAMPEGY
VQERTIFFKDDGNYKTRAEVKFEGDTLVNRIELKGIDFKEDGNILGHKLEYNYNSHNVYIMAD
KQKNGIKVNFKIRHNIEDGSVQLADHYQQNTPIGDGPVLLPDNHYLSTQSALSKDPNEKRDHM

[chemical structure]

H*
eGFP_3xFlagHis_ecoli-opt in pEX-1
SEQ ID NO: 62
MVSKGEELFTGVVPILVELDGDVNGHKFSVSGEGEGDATYGKLTLKFICTTGKLPVPWPTLVT
TLTYGVQCFSRYPDHMKQHDFFKSAMPEGYVQERTIFFKDDGNYKTRAEVKFEGDTLVNRIEL
KGIDFKEDGNILGHKLEYNYNSHNVYIMADKQKNGIKVNFKIRHNIEDGSVQLADHYQQNTPI

[chemical structure]

YKDHDGDYKDHDIDYKDDDDKDGAPHHHHHH*
AMPH1-3xFlagHis in pEX-1 (ecoli-opt)
SEQ ID NO: 63
MADIKTGIFAKNVQKRLNRAQEKVLQKLGKADETKDEQFEEYVQNFKRQEAEGTRLQRELRGY
LAAIKGMQEASMKLTESLHEVYEPDWYGREDVKMVGEKCDVLWEDFHQKLVDGSLLTLDTYLG
QFPDIKNRIAKRSRKLVDYDSARHHLEALQSSKRKDESRISKAEEEFQKAQKVFEEFNVDLQE
ELPSLWSRRVGFYVNTFKNVSSLEAKFHKEIAVLCHKLYEVMTKLGDQHADKAFTIQGAPSDS
GPLRIAKTPSPPEEPSPLPSPTASPNHTLAPASPAPARPRSPSQTRKGPPVPPLPKVTPTKEL
QQENIISFFEDNFVPEISVTTPSQNEVPEVKKEETLLDLDFDPFKPEVTPAGSAGVTHSPMSQ
TLPWDLWTTSTDLVQPASGGSFNGFTQPQDTSLFTMQTDQSMICNLAESEQAPPTEPKAEEPL
AAVTPAVGLDLGMDTRAEEPVEEAVIIPGADADAAVGTLVSAAEGAPGEEAEAEKATVPAGEG
VSLEEAKIGTETTEGAESAQPEAEELEATVPQEKVIPSVVIEPASNHEEEGENEITIGAEPKE
TTEDAAPPGPTSETPELATEQKPIQDPQPTPSAPAMGAADQLASAREASQELPPGFLYKVETL
HDFEAANSDELTLQRGDVVLVVPSDSEADQDAGWLVGVKESDWLQYRDLATYKGLFPENFTRR

[chemical structure]

AMPH1-3xFlagHis cho-opt in pOptiVec
SEQ ID NO: 64
MADIKTGIFAKNVQKRLNRAQEKVLQKLGKADETKDEQFEEYVQNFKRQEAEGTRLQRELRGY
LAAIKGMQEASMKLTESLHEVYEPDWYGREDVKMVGEKCDVLWEDFHQKLVDGSLLTLDTYLG
QFPDIKNRIAKRSRKLVDYDSARHHLEALQSSKRKDESRISKAEEEFQKAQKVFEEFNVDLQE
ELPSLWSRRVGFYVNTFKNVSSLEAKFHKEIAVLCHKLYEVMTKLGDQHADKAFTIQGAPSDS
GPLRIAKTPSPPEEPSPLPSPTASPNHTLAPASPAPARPRSPSQTRKGPPVPPLPKVTPTKEL
QQENIISFFEDNFVPEISVTTPSQNEVPEVKKEETLLDLDFDPFKPEVTPAGSAGVTHSPMSQ
TLPWDLWTTSTDLVQPASGGSFNGFTQPQDTSLFTMQTDQSMICNLAESEQAPPTEPKAEEPL
AAVTPAVGLDLGMDTRAEEPVEEAVIIPGADADAAVGTLVSAAEGAPGEEAEAEKATVPAGEG
VSLEEAKIGTETTEGAESAQPEAEELEATVPQEKVIPSVVIEPASNHEEEGENEITIGAEPKE
TTEDAAPPGPTSETPELATEQKPIQDPQPTPSAPAMGAADQLASAREASQELPPGFLYKVETL
HDFEAANSDELTLQRGDVVLVVPSDSEADQDAGWLVGVKESDWLQYRDLATYKGLFPENFTRR

[chemical structure]

MBip_TATκ11_107__3xFlagHis_cho-opt in pOptiVec
SEQ ID NO: 65
MKLSLVAAMLLLLSLVAAMLLLLSAARAGYARKAARQARAGGGGSKIPNIGNVMNKFEILGW
GEGAYGVVLKCRHKETHEIVAIKKFKDSEENEEVKETTLRELKMLRTLKQENIVELKEAFRRR
GKLYLVFEYVEKNMLELLEEMPNGVPPEKVKSYIYQLIKAIHWCHKNDIVHRDIKPENLLISH
NDVLKLCDFGFARNLSEGNNANYTEYVATRWYRSPELLLGAPYGKSVDMWSVGCILGELSDGQ
PLFPGESEIDQLETIQKVLGPLPSEQMKLFYSNPRFHGLREPAVNHPQSLERRYLGILNSVLL
DLMKNLLKLDPADRYLTEQCLNHPTFQTQRLLDRSPSRSAKRKPYHVESSTLSNRNQAGKSTA
LQSHHRSNSKDIQNLSVGLPRADEGLPANESFLNGNLAGASLSPLHTKTYQASSQPGSTSKDL
TNNNIPHLLSPKEAKSKTEFDFNIDPKPSEGPGTKYLKSNSRSQQNRHSFMESSQSKAGTLQP
NEKQSRHSYIDTIPQSSRSPSYRTKAKSHGALSDSKSVSNLSEARAQIAEPSTSRYFPSSCLD
LNSPTSPTPTRHSDTRTLLSPSGRNNRNEGTLDSRRTTTRHSKTMEELKLPEHMDSSHSHSLS
APHESFSYGLGYTSPFSSQQRPHRHSMYVTRDKVRAKGLDGSLSIGQGMAARANSLQLLSPQP
GEQLPPEMTVARSSVKETSREGTSSFHTRQKSEGGVYHDPHSDDGTAPKENRHLYNDPVPRRV
GSFYRVPSPRPDNSFHENNVSTRVSSLPSESSSGTNHSKRQPAFDPWKSPENISHSEQLKEKE
KQGFFRSMKKKKKKSQTVPNSDSPDLLTLQKSIHSASTPSSRPKEWRPEKISDLQTQSQPLKS
LRKLLHLSSASNHPASSDPRFQPLTAQQTKNSFSEIRIHPLSQASGGSSNIRQEPAPKGRPAL

[chemical structure]

Igκ_TATκ11_107_ 3xFlagHis_cho-opt in pOptiVec
SEQ ID NO: 66
METDTLLLWVLLLWVPGSTGGYARKAARQARAGGGGSKIPNIGNVMNKFEILGVVGEGAYGVV
LKCRHKETHEIVAIKKFKDSEENEEVKETTLRELKMLRTLKQENIVELKEAFRRRGKLYLVFE
YVEKNMLELLEEMPNGVPPEKVKSYIYQLIKAIHWCHKNDIVHRDIKPENLLISHNDVLKLCD
FGFARNLSEGNNANYTEYVATRWYRSPELLLGAPYGKSVDMWSVGCILGELSDGQPLFPGESE
IDQLFTIQKVLGPLPSEQMKLFYSNPRFHGLRFPAVNHPQSLERRYLGILNSVLLDLMKNLLK
LDPADRYLTEQCLNHPTFQTQRLLDRSPSRSAKRKPYHVESSTLSNRNQAGKSTALQSHHRSN
SKDIQNLSVGLPRADEGLPANESFLNGNLAGASLSPLHTKTYQASSQPGSTSKDLTNNNIPHL
LSPKEAKSKTEFDFNIDPKPSEGPGTKYLKSNSRSQQNRHSFMESSQSKAGTLQPNEKQSRHS
YIDTIPQSSRSPSYRTKAKSHGALSDSKSVSNLSEARAQIAEPSTSRYFPSSCLDLNSPTSPT
PTRHSDTRTLLSPSGRNNRNEGTLDSRRTTTRHSKTMEELKLPEHMDSSHSHSLSAPHESFSY
GLGYTSPFSSQQRPHRHSMYVTRDKVRAKGLDGSLSIGQGMAARANSLQLLSPQPGEQLPPEM
TVARSSVKETSREGTSSFHTRQKSEGGVYHDPHSDDGTAPKENRHLYNDPVPRRVGSFYRVPS
PRPDNSFHENNVSTRVSSLPSESSSGTNHSKRQPAFDPWKSPENISHSEQLKEKEKQGFFRSM
KKKKKKSQTVPNSDSPDLLTLQKSIHSASTPSSRPKEWRPEKISDLQTQSQPLKSLRKLLHLS
SASNHPASSDPRFQPLTAQQTKNSFSEIRIHPLSQASGGSSNIRQEPAPKGRPALQLPGQMDP

[chemical structure]

DYKDHDGDYKDHDIDYKDDDDKDGAPHHHHHH*
TATκ11_107_3xFlagHis_cho-opt in pOptiVec (leaderless)
SEQ ID NO: 67
MGYARKAARQARAGGGGSKIPNIGNVMNKFEILGVVGEGAYGVVLKCRHKETHEIVAIKKFKD
SEENEEVKETTLRELKMLRTLKQENIVELKEAFRRRGKLYLVFEYVEKNMLELLEEMPNGVPP
EKVKSYIYQLIKAIHWCHKNDIVHRDIKPENLLISHNDVLKLCDFGFARNLSEGNNANYTEYV
ATRWYRSPELLLGAPYGKSVDMWSVGCILGELSDGQPLFPGESEIDQLFTIQKVLGPLPSEQM
KLFYSNPRFHGLRFPAVNHPQSLERRYLGILNSVLLDLMKNLLKLDPADRYLTEQCLNHPTFQ
TQRLLDRSPSRSAKRKPYHVESSTLSNRNQAGKSTALQSHHRSNSKDIQNLSVGLPRADEGLP
ANESFLNGNLAGASLSPLHTKTYQASSQPGSTSKDLTNNNIPHLLSPKEAKSKTEFDFNIDPK
PSEGPGTKYLKSNSRSQQNRHSFMESSQSKAGTLQPNEKQSRHSYIDTIPQSSRSPSYRTKAK
SHGALSDSKSVSNLSEARAQIAEPSTSRYFPSSCLDLNSPTSPTPTRHSDTRTLLSPSGRNNR
NEGTLDSRRTTTRHSKTMEELKLPEHMDSSHSHSLSAPHESFSYGLGYTSPFSSQQRPHRHSM
YVTRDKVRAKGLDGSLSIGQGMAARANSLQLLSPQPGEQLPPEMTVARSSVKETSREGTSSFH
TRQKSEGGVYHDPHSDDGTAPKENRHLYNDPVPRRVGSFYRVPSPRPDNSFHENNVSTRVSSL
PSESSSGTNHSKRQPAFDPWKSPENISHSEQLKEKEKQGFFRSMKKKKKKSQTVPNSDSPDLL
TLQKSIHSASTPSSRPKEWRPEKISDLQTQSQPLKSLRKLLHLSSASNHPASSDPRFQPLTAQ
QTKNSFSEIRIHPLSQASGGSSNIRQEPAPKGRPALQLPGQMDPGWHVSSVTRSATEGPSYSE

[chemical structure]

DDKDGAPHHHHHH*
TATκ11_107_3xFlagHis_ecoli-opt in pEX-1
SEQ ID NO: 68
MGYARKAARQARAGGGGSKIPNIGNVMNKFEILGVVGEGAYGVVLKCRHKETHEIVAIKKFKD
SEENEEVKETTLRELKMLRTLKQENIVELKEAFRRRGKLYLVFEYVEKNMLELLEEMPNGVPP
EKVKSYIYQLIKAIHWCHKNDIVHRDIKPENLLISHNDVLKLCDFGFARNLSEGNNANYTEYV
ATRWYRSPELLLGAPYGKSVDMWSVGCILGELSDGQPLFPGESEIDQLFTIQKVLGPLPSEQM
KLFYSNPRFHGLRFPAVNHPQSLERRYLGILNSVLLDLMKNLLKLDPADRYLTEQCLNHPTFQ
TQRLLDRSPSRSAKRKPYHVESSTLSNRNQAGKSTALQSHHRSNSKDIQNLSVGLPRADEGLP
ANESFLNGNLAGASLSPLHTKTYQASSQPGSTSKDLTNNNIPHLLSPKEAKSKTEFDFNIDPK
PSEGPGTKYLKSNSRSQQNRHSFMESSQSKAGTLQPNEKQSRHSYIDTIPQSSRSPSYRTKAK
SHGALSDSKSVSNLSEARAQIAEPSTSRYFPSSCLDLNSPTSPTPTRHSDTRTLLSPSGRNNR
NEGTLDSRRTTTRHSKTMEELKLPEHMDSSHSHSLSAPHESFSYGLGYTSPFSSQQRPHRHSM
YVTRDKVRAKGLDGSLSIGQGMAARANSLQLLSPQPGEQLPPEMTVARSSVKETSREGTSSFH
TRQKSEGGVYHDPHSDDGTAPKENRHLYNDPVPRRVGSFYRVPSPRPDNSFHENNVSTRVSSL
PSESSSGTNHSKRQPAFDPWKSPENISHSEQLKEKEKQGFFRSMKKKKKKSQTVPNSDSPDLL
TLQKSIHSASTPSSRPKEWRPEKISDLQTQSQPLKSLRKLLHLSSASNHPASSDPRFQPLTAQ
QTKNSFSEIRIHPLSQASGGSSNIRQEPAPKGRPALQLPGQMDPGWHVSSVTRSATEGPSYSE

[chemical structure]

DDKDGAPHHHHHH*
TAT11_107_3xFlagHis_ecoli-opt in pEX-1
SEQ ID NO: 69
MGYGRKKRRQRRRGGGGSKIPNIGNVMNKFEILGVVGEGAYGVVLKCRHKETHEIVAIKKFKD
SEENEEVKETTLRELKMLRTLKQENIVELKEAFRRRGKLYLVFEYVEKNMLELLEEMPNGVPP
EKVKSYIYQLIKAIHWCHKNDIVHRDIKPENLLISHNDVLKLCDFGFARNLSEGNNANYTEYV
ATRWYRSPELLLGAPYGKSVDMWSVGCILGELSDGQPLFPGESEIDQLFTIQKVLGPLPSEQM
KLFYSNPRFHGLRFPAVNHPQSLERRYLGILNSVLLDLMKNLLKLDPADRYLTEQCLNHPTFQ
TQRLLDRSPSRSAKRKPYHVESSTLSNRNQAGKSTALQSHHRSNSKDIQNLSVGLPRADEGLP
ANESFLNGNLAGASLSPLHTKTYQASSQPGSTSKDLTNNNIPHLLSPKEAKSKTEFDFNIDPK
PSEGPGTKYLKSNSRSQQNRHSFMESSQSKAGTLQPNEKQSRHSYIDTIPQSSRSPSYRTKAK
SHGALSDSKSVSNLSEARAQIAEPSTSRYFPSSCLDLNSPTSPTPTRHSDTRTLLSPSGRNNR
NEGTLDSRRTTTRHSKTMEELKLPEHMDSSHSHSLSAPHESFSYGLGYTSPFSSQQRPHRHSM
YVTRDKVRAKGLDGSLSIGQGMAARANSLQLLSPQPGEQLPPEMTVARSSVKETSREGTSSFH
TRQKSEGGVYHDPHSDDGTAPKENRHLYNDPVPRRVGSFYRVPSPRPDNSFHENNVSTRVSSL
PSESSSGTNHSKRQPAFDPWKSPENISHSEQLKEKEKQGFFRSMKKKKKKSQTVPNSDSPDLL
TLQKSIHSASTPSSRPKEWRPEKISDLQTQSQPLKSLRKLLHLSSASNHPASSDPRFQPLTAQ
QTKNSFSEIRIHPLSQASGGSSNIRQEPAPKGRPALQLPGQMDPGWHVSSVTRSATEGPSYSE

[chemical structure]

DDKDGAPHHHHHH*
TAT11_107_3xFlagHis_cho-opt in pOptiVec (leaderless)
SEQ ID NO: 70
MGYGRKKRRQRRRGGGGSKIPNIGNVMNKFEILGVVGEGAYGVVLKCRHKETHEIVAIKKFKD
SEENEEVKETTLRELKMLRTLKQENIVELKEAFRRRGKLYLVFEYVEKNMLELLEEMPNGVPP
EKVKSYIYQLIKAIHWCHKNDIVHRDIKPENLLISHNDVLKLCDFGFARNLSEGNNANYTEYV
ATRWYRSPELLLGAPYGKSVDMWSVGCILGELSDGQPLFPGESEIDQLFTIQKVLGPLPSEQM
KLFYSNPRFHGLRFPAVNHPQSLERRYLGILNSVLLDLMKNLLKLDPADRYLTEQCLNHPTFQ
TQRLLDRSPSRSAKRKPYHVESSTLSNRNQAGKSTALQSHHRSNSKDIQNLSVGLPRADEGLP
ANESFLNGNLAGASLSPLHTKTYQASSQPGSTSKDLTNNNIPHLLSPKEAKSKTEFDFNIDPK
PSEGPGTKYLKSNSRSQQNRHSFMESSQSKAGTLQPNEKQSRHSYIDTIPQSSRSPSYRTKAK
SHGALSDSKSVSNLSEARAQIAEPSTSRYFPSSCLDLNSPTSPTPTRHSDTRTLLSPSGRNNR
NEGTLDSRRTTTRHSKTMEELKLPEHMDSSHSHSLSAPHESFSYGLGYTSPFSSQQRPHRHSM
YVTRDKVRAKGLDGSLSIGQGMAARANSLQLLSPQPGEQLPPEMTVARSSVKETSREGTSSFH
TRQKSEGGVYHDPHSDDGTAPKENRHLYNDPVPRRVGSFYRVPSPRPDNSFHENNVSTRVSSL
PSESSSGTNHSKRQPAFDPWKSPENISHSEQLKEKEKQGFFRSMKKKKKKSQTVPNSDSPDLL
TLQKSIHSASTPSSRPKEWRPEKISDLQTQSQPLKSLRKLLHLSSASNHPASSDPRFQPLTAQ
QTKNSFSEIRIHPLSQASGGSSNIRQEPAPKGRPALQLPGQMDPGWHVSSVTRSATEGPSYSE

[chemical structure]

DDKDGAPHHHHHH
ANTP_107_3xFlagHis_cho-opt in pOptiVec
SEQ ID NO: 71
MGRQIKIWFQNRRMKWKKGGGGSKIPNIGNVMNKFEILGVVGEGAYGVVLKCRHKETHEIVAI
KKFKDSEENEEVKETTLRELKMLRTLKQENIVELKEAFRRRGKLYLVFEYVEKNMLELLEEMP
NGVPPEKVKSYIYQLIKAIHWCHKNDIVHRDIKPENLLISHNDVLKLCDFGFARNLSEGNNAN
YTEYVATRWYRSPELLLGAPYGKSVDMWSVGCILGELSDGQPLFPGESEIDQLFTIQKVLGPL
PSEQMKLFYSNPRFHGLRFPAVNHPQSLERRYLGILNSVLLDLMKNLLKLDPADRYLTEQCLN
HPTFQTQRLLDRSPSRSAKRKPYHVESSTLSNRNQAGKSTALQSHHRSNSKDIQNLSVGLPRA
DEGLPANESFLNGNLAGASLSPLHTKTYQASSQPGSTSKDLTNNNIPHLLSPKEAKSKTEFDF
NIDPKPSEGPGTKYLKSNSRSQQNRHSFMESSQSKAGTLQPNEKQSRHSYIDTIPQSSRSPSY
RTKAKSHGALSDSKSVSNLSEARAQIAEPSTSRYFPSSCLDLNSPTSPTPTRHSDTRTLLSPS
GRNNRNEGTLDSRRTTTRHSKTMEELKLPEHMDSSHSHSLSAPHESFSYGLGYTSPFSSQQRP
HRHSMYVTRDKVRAKGLDGSLSIGQGMAARANSLQLLSPQPGEQLPPEMTVARSSVKETSREG
TSSFHTRQKSEGGVYHDPHSDDGTAPKENRHLYNDPVPRRVGSFYRVPSPRPDNSFHENNVST
RVSSLPSESSSGTNHSKRQPAFDPWKSPENISHSEQLKEKEKQGFFRSMKKKKKKSQTVPNSD
SPDLLTLQKSIHSASTPSSRPKEWRPEKISDLQTQSQPLKSLRKLLHLSSASNHPASSDPRFQ
PLTAQQTKNSFSEIRIHPLSQASGGSSNIRQEPAPKGRPALQLPGQMDPGWHVSSVTRSATEG

[chemical structure]

DYKDDDDKDGAPHHHHHH*
TRANSP_107_3xFlagHis_cho-opt in pOptiVec
SEQ ID NO: 72
MGAGYLLGKINLKALAALAKKILGGGGSKIPNIGNVMNKFEILGVVGEGAYGVVLKCRHKETH
EIVAIKKFKDSEENEEVKETTLRELKMLRTLKQENIVELKEAFRRRGKLYLVFEYVEKNMLEL
LEEMPNGVPPEKVKSYIYQLIKAIHWCHKNDIVHRDIKPENLLISHNDVLKLCDFGFARNLSE
GNNANYTEYVATRWYRSPELLLGAPYGKSVDMWSVGCILGELSDGQPLFPGESEIDQLFTIQK
VLGPLPSEQMKLFYSNPRFHGLRFPAVNHPQSLERRYLGILNSVLLDLMKNLLKLDPADRYLT
EQCLNHPTFQTQRLLDRSPSRSAKRKPYHVESSTLSNRNQAGKSTALQSHHRSNSKDIQNLSV
GLPRADEGLPANESFLNGNLAGASLSPLHTKTYQASSQPGSTSKDLTNNNIPHLLSPKEAKSK
TEFDFNIDPKPSEGPGTKYLKSNSRSQQNRHSFMESSQSKAGTLQPNEKQSRHSYIDTIPQSS
RSPSYRTKAKSHGALSDSKSVSNLSEARAQIAEPSTSRYFPSSCLDLNSPTSPTPTRHSDTRT
LLSPSGRNNRNEGTLDSRRTTTRHSKTMEELKLPEHMDSSHSHSLSAPHESFSYGLGYTSPFS
SQQRPHRHSMYVTRDKVRAKGLDGSLSIGQGMAARANSLQLLSPQPGEQLPPEMTVARSSVKE
TSREGTSSFHTRQKSEGGVYHDPHSDDGTAPKENRHLYNDPVPRRVGSFYRVPSPRPDNSFHE
NNVSTRVSSLPSESSSGTNHSKRQPAFDPWKSPENISHSEQLKEKEKQGFFRSMKKKKKKSQT
VPNSDSPDLLTLQKSIHSASTPSSRPKEWRPEKISDLQTQSQPLKSLRKLLHLSSASNHPASS
DPRFQPLTAQQTKNSFSEIRIHPLSQASGGSSNIRQEPAPKGRPALQLPGQMDPGWHVSSVTR

[chemical structure]

KDHDIDYKDDDDKDGAPHHHHHH*
TAT28_107_3xFlagHis_cho-opt in pOptiVec
SEQ ID NO: 73
MGDAAQPARRARRTKLAAYGRKKRRQRRRGGGGSKIPNIGNVMNKFEILGVVGEGAYGVVLKC
RHKETHEIVAIKKFKDSEENEEVKETTLRELKMLRTLKQENIVELKEAFRRRGKLYLVFEYVE
KNMLELLEEMPNGVPPEKVKSYIYQLIKAIHWCHKNDIVHRDIKPENLLISHNDVLKLCDFGF
ARNLSEGNNANYTEYVATRWYRSPELLLGAPYGKSVDMWSVGCILGELSDGQPLFPGESEIDQ
LFTIQKVLGPLPSEQMKLFYSNPRFHGLRFPAVNHPQSLERRYLGILNSVLLDLMKNLLKLDP
ADRYLTEQCLNHPTFQTQRLLDRSPSRSAKRKPYHVESSTLSNRNQAGKSTALQSHHRSNSKD
IQNLSVGLPRADEGLPANESFLNGNLAGASLSPLHTKTYQASSQPGSTSKDLTNNNIPHLLSP
KEAKSKTEFDFNIDPKPSEGPGTKYLKSNSRSQQNRHSFMESSQSKAGTLQPNEKQSRHSYID
TIPQSSRSPSYRTKAKSHGALSDSKSVSNLSEARAQIAEPSTSRYFPSSCLDLNSPTSPTPTR
HSDTRTLLSPSGRNNRNEGTLDSRRTTTRHSKTMEELKLPEHMDSSHSHSLSAPHESFSYGLG
YTSPFSSQQRPHRHSMYVTRDKVRAKGLDGSLSIGQGMAARANSLQLLSPQPGEQLPPEMTVA
RSSVKETSREGTSSFHTRQKSEGGVYHDPHSDDGTAPKENRHLYNDPVPRRVGSFYRVPSPRP
DNSFHENNVSTRVSSLPSESSSGTNHSKRQPAFDPWKSPENISHSEQLKEKEKQGFFRSMKKK
KKKSQTVPNSDSPDLLTLQKSIHSASTPSSRPKEWRPEKISDLQTQSQPLKSLRKLLHLSSAS
NHPASSDPRFQPLTAQQTKNSFSEIRIHPLSQASGGSSNIRQEPAPKGRPALQLPGQMDPGWH

[chemical structure]

DHDGDYKDHDIDYKDDDDKDGAPHHHHHH*
MBIP_P97_107_3xFlagHis_cho-opt in pOptiVec
SEQ ID NO: 74
MKLSLVAAMLLLLSLVAAMLLLLSAARAGDSSHAFTLDELRGGGGSKIPNIGNVMNKFEILGV
VGEGAYGVVLKCRHKETHEIVAIKKFKDSEENEEVKETTLRELKMLRTLKQENIVELKEAFRR
RGKLYLVFEYVEKNMLELLEEMPNGVPPEKVKSYIYQLIKAIHWCHKNDIVHRDIKPENLLIS
HNDVLKLCDFGFARNLSEGNNANYTEYVATRWYRSPELLLGAPYGKSVDMWSVGCILGELSDG
QPLFPGESEIDQLFTIQKVLGPLPSEQMKLFYSNPRFHGLRFPAVNHPQSLERRYLGILNSVL
LDLMKNLLKLDPADRYLTEQCLNHPTFQTQRLLDRSPSRSAKRKPYHVESSTLSNRNQAGKST
ALQSHHRSNSKDIQNLSVGLPRADEGLPANESFLNGNLAGASLSPLHTKTYQASSQPGSTSKD
LTNNNIPHLLSPKEAKSKTEFDFNIDPKPSEGPGTKYLKSNSRSQQNRHSFMESSQSKAGTLQ
PNEKQSRHSYIDTIPQSSRSPSYRTKAKSHGALSDSKSVSNLSEARAQIAEPSTSRYFPSSCL
DLNSPTSPTPTRHSDTRTLLSPSGRNNRNEGTLDSRRTTTRHSKTMEELKLPEHMDSSHSHSL
SAPHESESYGLGYTSPESSQQRPHRHSMYVTRDKVRAKGLDGSLSIGQGMAARANSLQLLSPQ
PGEQLPPEMTVARSSVKETSREGTSSFHTRQKSEGGVYHDPHSDDGTAPKENRHLYNDPVPRR
VGSFYRVPSPRPDNSFHENNVSTRVSSLPSESSSGTNHSKRQPAFDPWKSPENISHSEQLKEK
EKQGFFRSMKKKKKKSQTVPNSDSPDLLTLQKSIHSASTPSSRPKEWRPEKISDLQTQSQPLK
SLRKLLHLSSASNHPASSDPRFQPLTAQQTKNSFSEIRIHPLSQASGGSSNIRQEPAPKGRPA

[chemical structure]

P97_107_3xFlagHis_human-opt in pT7CFEl
SEQ ID NO: 75
MGDSSHAFTLDELRGGGGSKIPNIGNVMNKFEILGVVGEGAYGVVLKCRHKETHEIVAIKKFK
DSEENEEVKETTLRELKMLRTLKQENIVELKEAFRRRGKLYLVFEYVEKNMLELLEEMPNGVP
PEKVKSYIYQLIKAIHWCHKNDIVHRDIKPENLLISHNDVLKLCDFGFARNLSEGNNANYTEY
VATRWYRSPELLLGAPYGKSVDMWSVGCILGELSDGQPLFPGESEIDQLFTIQKVLGPLPSEQ
MKLFYSNPRFHGLRFPAVNHPQSLERRYLGILNSVLLDLMKNLLKLDPADRYLTEQCLNHPTF
QTQRLLDRSPSRSAKRKPYHVESSTLSNRNQAGKSTALQSHHRSNSKDIQNLSVGLPRADEGL
PANESFLNGNLAGASLSPLHTKTYQASSQPGSTSKDLTNNNIPHLLSPKEAKSKTEFDFNIDP
KPSEGPGTKYLKSNSRSQQNRHSFMESSQSKAGTLQPNEKQSRHSYIDTIPQSSRSPSYRTKA
KSHGALSDSKSVSNLSEARAQIAEPSTSRYFPSSCLDLNSPTSPTPTRHSDTRTLLSPSGRNN
RNEGTLDSRRTTTRHSKTMEELKLPEHMDSSHSHSLSAPHESFSYGLGYTSPFSSQQRPHRHS
MYVTRDKVRAKGLDGSLSIGQGMAARANSLQLLSPQPGEQLPPEMTVARSSVKETSREGTSSF
HTRQKSEGGVYHDPHSDDGTAPKENRHLYNDPVPRRVGSFYRVPSPRPDNSFHENNVSTRVSS
LPSESSSGTNHSKRQPAFDPWKSPENISHSEQLKEKEKQGFFRSMKKKKKKSQTVPNSDSPDL
LTLQKSIHSASTPSSRPKEWRPEKISDLQTQSQPLKSLRKLLHLSSASNHPASSDPRFQPLTA
QQTKNSFSEIRIHPLSQASGGSSNIRQEPAPKGRPALQLPGQMDPGWHVSSVTRSATEGPSYS

[chemical structure]

DDDKDGAPHHHHHH*
Tκ28p_107_3xFlagHis_human-opt in pOptiVec
SEQ ID NO: 76
MGDAAQPARRARRTKLAAYARKAARQARAGGGGSKIPNIGNVMNKFEILGVVGEGAYGVVLKC
RHKETHEIVAIKKFKDSEENEEVKETTLRELKMLRTLKQENIVELKEAFRRRGKLYLVFEYVE
KNMLELLEEMPNGVPPEKVKSYIYQLIKAIHWCHKNDIVHRDIKPENLLISHNDVLKLCDFGF
ARNLSEGNNANYTEYVATRWYRSPELLLGAPYGKSVDMWSVGCILGELSDGQPLFPGESEIDQ
LFTIQKVLGPLPSEQMKLFYSNPRFHGLRFPAVNHPQSLERRYLGILNSVLLDLMKNLLKLDP
ADRYLTEQCLNHPTFQTQRLLDRSPSRSAKRKPYHVESSTLSNRNQAGKSTALQSHHRSNSKD
IQNLSVGLPRADEGLPANESFLNGNLAGASLSPLHTKTYQASSQPGSTSKDLTNNNIPHLLSP
KEAKSKTEFDFNIDPKPSEGPGTKYLKSNSRSQQNRHSFMESSQSKAGTLQPNEKQSRHSYID
TIPQSSRSPSYRTKAKSHGALSDSKSVSNLSEARAQIAEPSTSRYFPSSCLDLNSPTSPTPTR
HSDTRTLLSPSGRNNRNEGTLDSRRTTTRHSKTMEELKLPEHMDSSHSHSLSAPHESFSYGLG
YTSPFSSQQRPHRHSMYVTRDKVRAKGLDGSLSIGQGMAARANSLQLLSPQPGEQLPPEMTVA
RSSVKETSREGTSSFHTRQKSEGGVYHDPHSDDGTAPKENRHLYNDPVPRRVGSFYRVPSPRP
DNSFHENNVSTRVSSLPSESSSGTNHSKRQPAFDPWKSPENISHSEQLKEKEKQGFFRSMKKK
KKKSQTVPNSDSPDLLTLQKSIHSASTPSSRPKEWRPEKISDLQTQSQPLKSLRKLLHLSSAS
NHPASSDPRFQPLTAQQTKNSFSEIRIHPLSQASGGSSNIRQEPAPKGRPALQLPGQMDPGWH

[chemical structure]

DHDGDYKDHDIDYKDDDDKDGAPHHHHHH*
TATκ11_107_3xFlagHis_human-opt in pOptiVec
SEQ ID NO: 77
MGYARKAARQARAGGGGSKIPNIGNVMNKFEILGVVGEGAYGVVLKCRHKETHEIVAIKKFKD
SEENEEVKETTLRELKMLRTLKQENIVELKEAFRRRGKLYLVFEYVEKNMLELLEEMPNGVPP
EKVKSYIYQLIKAIHWCHKNDIVHRDIKPENLLISHNDVLKLCDFGFARNLSEGNNANYTEYV
ATRWYRSPELLLGAPYGKSVDMWSVGCILGELSDGQPLFPGESEIDQLETIQKVLGPLPSEQM
KLFYSNPRFHGLRFPAVNHPQSLERRYLGILNSVLLDLMKNLLKLDPADRYLTEQCLNHPTFQ
TQRLLDRSPSRSAKRKPYHVESSTLSNRNQAGKSTALQSHHRSNSKDIQNLSVGLPRADEGLP
ANESFLNGNLAGASLSPLHTKTYQASSQPGSTSKDLTNNNIPHLLSPKEAKSKTEFDFNIDPK
PSEGPGTKYLKSNSRSQQNRHSFMESSQSKAGTLQPNEKQSRHSYIDTIPQSSRSPSYRTKAK
SHGALSDSKSVSNLSEARAQIAEPSTSRYFPSSCLDLNSPTSPTPTRHSDTRTLLSPSGRNNR
NEGTLDSRRTTTRHSKTMEELKLPEHMDSSHSHSLSAPHESFSYGLGYTSPFSSQQRPHRHSM
YVTRDKVRAKGLDGSLSIGQGMAARANSLQLLSPQPGEQLPPEMTVARSSVKETSREGTSSFH
TRQKSEGGVYHDPHSDDGTAPKENRHLYNDPVPRRVGSFYRVPSPRPDNSFHENNVSTRVSSL
PSESSSGTNHSKRQPAFDPWKSPENISHSEQLKEKEKQGFFRSMKKKKKKSQTVPNSDSPDLL
TLQKSIHSASTPSSRPKEWRPEKISDLQTQSQPLKSLRKLLHLSSASNHPASSDPRFQPLTAQ
QTKNSFSEIRIHPLSQASGGSSNIRQEPAPKGRPALQLPGQMDPGWHVSSVTRSATEGPSYSE

[chemical structure]

DDKDGAPHHHHHH*
TAT28_107_3xFlagHis_human-opt in pOptiVec
SEQ ID NO: 78
MGDAAQPARRARRTKLAAYGRKKRRQRRRGGGGSKIPNIGNVMNKFEILGVVGEGAYGVVLKC
RHKETHEIVAIKKFKDSEENEEVKETTLRELKMLRTLKQENIVELKEAFRRRGKLYLVFEYVE
KNMLELLEEMPNGVPPEKVKSYIYQLIKAIHWCHKNDIVHRDIKPENLLISHNDVLKLCDFGF
ARNLSEGNNANYTEYVATRWYRSPELLLGAPYGKSVDMWSVGCILGELSDGQPLFPGESEIDQ
LFTIQKVLGPLPSEQMKLFYSNPRFHGLRFPAVNHPQSLERRYLGILNSVLLDLMKNLLKLDP
ADRYLTEQCLNHPTFQTQRLLDRSPSRSAKRKPYHVESSTLSNRNQAGKSTALQSHHRSNSKD
IQNLSVGLPRADEGLPANESFLNGNLAGASLSPLHTKTYQASSQPGSTSKDLTNNNIPHLLSP
KEAKSKTEFDFNIDPKPSEGPGTKYLKSNSRSQQNRHSFMESSQSKAGTLQPNEKQSRHSYID
TIPQSSRSPSYRTKAKSHGALSDSKSVSNLSEARAQIAEPSTSRYFPSSCLDLNSPTSPTPTR
HSDTRTLLSPSGRNNRNEGTLDSRRTTTRHSKTMEELKLPEHMDSSHSHSLSAPHESFSYGLG
YTSPFSSQQRPHRHSMYVTRDKVRAKGLDGSLSIGQGMAARANSLQLLSPQPGEQLPPEMTVA
RSSVKETSREGTSSFHTRQKSEGGVYHDPHSDDGTAPKENRHLYNDPVPRRVGSFYRVPSPRP
DNSFHENNVSTRVSSLPSESSSGTNHSKRQPAFDPWKSPENISHSEQLKEKEKQGFFRSMKKK
KKKSQTVPNSDSPDLLTLQKSIHSASTPSSRPKEWRPEKISDLQTQSQPLKSLRKLLHLSSAS
NHPASSDPRFQPLTAQQTKNSFSEIRIHPLSQASGGSSNIRQEPAPKGRPALQLPGQMDPGWH

[chemical structure]

DHDGDYKDHDIDYKDDDDKDGAPHHHHHH*
TAT11_107_3xFlagHis_human-opt in pOptiVec
SEQ ID NO: 79
MGYGRKKRRQRRRGGGGSKIPNIGNVMNKFEILGVVGEGAYGVVLKCRHKETHEIVAIKKFKD
SEENEEVKETTLRELKMLRTLKQENIVELKEAFRRRGKLYLVFEYVEKNMLELLEEMPNGVPP
EKVKSYIYQLIKAIHWCHKNDIVHRDIKPENLLISHNDVLKLCDFGFARNLSEGNNANYTEYV
ATRWYRSPELLLGAPYGKSVDMWSVGCILGELSDGQPLFPGESEIDQLFTIQKVLGPLPSEQM
KLFYSNPRFHGLRFPAVNHPQSLERRYLGILNSVLLDLMKNLLKLDPADRYLTEQCLNHPTFQ
TQRLLDRSPSRSAKRKPYHVESSTLSNRNQAGKSTALQSHHRSNSKDIQNLSVGLPRADEGLP
ANESFLNGNLAGASLSPLHTKTYQASSQPGSTSKDLTNNNIPHLLSPKEAKSKTEFDFNIDPK
PSEGPGTKYLKSNSRSQQNRHSFMESSQSKAGTLQPNEKQSRHSYIDTIPQSSRSPSYRTKAK
SHGALSDSKSVSNLSEARAQIAEPSTSRYFPSSCLDLNSPTSPTPTRHSDTRTLLSPSGRNNR
NEGTLDSRRTTTRHSKTMEELKLPEHMDSSHSHSLSAPHESFSYGLGYTSPFSSQQRPHRHSM
YVTRDKVRAKGLDGSLSIGQGMAARANSLQLLSPQPGEQLPPEMTVARSSVKETSREGTSSFH
TRQKSEGGVYHDPHSDDGTAPKENRHLYNDPVPRRVGSFYRVPSPRPDNSFHENNVSTRVSSL
PSESSSGTNHSKRQPAFDPWKSPENISHSEQLKEKEKQGFFRSMKKKKKKSQTVPNSDSPDLL
TLQKSIHSASTPSSRPKEWRPEKISDLQTQSQPLKSLRKLLHLSSASNHPASSDPRFQPLTAQ
QTKNSFSEIRIHPLSQASGGSSNIRQEPAPKGRPALQLPGQMDPGWHVSSVTRSATEGPSYSE

[chemical structure]

DDKDGAPHHHHHH*
ANTP_107_3xFlagHis_human-opt in pOptiVec
SEQ ID NO: 80
MGRQIKIWFQNRRMKWKKGGGGSKIPNIGNVMNKFEILGVVGEGAYGVVLKCRHKETHEIVAI
KKFKDSEENEEVKETTLRELKMLRTLKQENIVELKEAFRRRGKLYLVFEYVEKNMLELLEEMP
NGVPPEKVKSYIYQLIKAIHWCHKNDIVHRDIKPENLLISHNDVLKLCDFGFARNLSEGNNAN
YTEYVATRWYRSPELLLGAPYGKSVDMWSVGCILGELSDGQPLFPGESEIDQLFTIQKVLGPL
PSEQMKLFYSNPRFHGLRFPAVNHPQSLERRYLGILNSVLLDLMKNLLKLDPADRYLTEQCLN
HPTFQTQRLLDRSPSRSAKRKPYHVESSTLSNRNQAGKSTALQSHHRSNSKDIQNLSVGLPRA
DEGLPANESFLNGNLAGASLSPLHTKTYQASSQPGSTSKDLTNNNIPHLLSPKEAKSKTEFDF
NIDPKPSEGPGTKYLKSNSRSQQNRHSFMESSQSKAGTLQPNEKQSRHSYIDTIPQSSRSPSY
RTKAKSHGALSDSKSVSNLSEARAQIAEPSTSRYFPSSCLDLNSPTSPTPTRHSDTRTLLSPS
GRNNRNEGTLDSRRTTTRHSKTMEELKLPEHMDSSHSHSLSAPHESFSYGLGYTSPFSSQQRP
HRHSMYVTRDKVRAKGLDGSLSIGQGMAARANSLQLLSPQPGEQLPPEMTVARSSVKETSREG
TSSFHTRQKSEGGVYHDPHSDDGTAPKENRHLYNDPVPRRVGSFYRVPSPRPDNSFHENNVST
RVSSLPSESSSGTNHSKRQPAFDPWKSPENISHSEQLKEKEKQGFFRSMKKKKKKSQTVPNSD
SPDLLTLQKSIHSASTPSSRPKEWRPEKISDLQTQSQPLKSLRKLLHLSSASNHPASSDPRFQ
PLTAQQTKNSFSEIRIHPLSQASGGSSNIRQEPAPKGRPALQLPGQMDPGWHVSSVTRSATEG

[chemical structure]

DYKDDDDKDGAPHHHHHH*
TRANSP_107_3xFlagHis_human-opt in pOptiVec
SEQ ID NO: 81
MGAGYLLGKINLKALAALAKKILGGGGSKIPNIGNVMNKFEILGVVGEGAYGVVLKCRHKETH
EIVAIKKFKDSEENEEVKETTLRELKMLRTLKQENIVELKEAFRRRGKLYLVFEYVEKNMLEL
LEEMPNGVPPEKVKSYIYQLIKAIHWCHKNDIVHRDIKPENLLISHNDVLKLCDFGFARNLSE
GNNANYTEYVATRWYRSPELLLGAPYGKSVDMWSVGCILGELSDGQPLFPGESEIDQLFTIQK
VLGPLPSEQMKLFYSNPRFHGLRFPAVNHPQSLERRYLGILNSVLLDLMKNLLKLDPADRYLT
EQCLNHPTFQTQRLLDRSPSRSAKRKPYHVESSTLSNRNQAGKSTALQSHHRSNSKDIQNLSV
GLPRADEGLPANESFLNGNLAGASLSPLHTKTYQASSQPGSTSKDLTNNNIPHLLSPKEAKSK
TEFDFNIDPKPSEGPGTKYLKSNSRSQQNRHSFMESSQSKAGTLQPNEKQSRHSYIDTIPQSS
RSPSYRTKAKSHGALSDSKSVSNLSEARAQIAEPSTSRYFPSSCLDLNSPTSPTPTRHSDTRT
LLSPSGRNNRNEGTLDSRRTTTRHSKTMEELKLPEHMDSSHSHSLSAPHESFSYGLGYTSPFS
SQQRPHRHSMYVTRDKVRAKGLDGSLSIGQGMAARANSLQLLSPQPGEQLPPEMTVARSSVKE
TSREGTSSFHTRQKSEGGVYHDPHSDDGTAPKENRHLYNDPVPRRVGSFYRVPSPRPDNSFHE
NNVSTRVSSLPSESSSGTNHSKRQPAFDPWKSPENISHSEQLKEKEKQGFFRSMKKKKKKSQT
VPNSDSPDLLTLQKSIHSASTPSSRPKEWRPEKISDLQTQSQPLKSLRKLLHLSSASNHPASS
DPRFQPLTAQQTKNSFSEIRIHPLSQASGGSSNIRQEPAPKGRPALQLPGQMDPGWHVSSVTR

[chemical structure]

KDHDIDYKDDDDKDGAPHHHHHH*
MBip_Tκ28p_107_3xFlagHis_human-opt in pOptiVec
SEQ ID NO: 82
MKLSLVAAMLLLLSLVAAMLLLLSAARAGDAAQPARRARRTKLAAYARKAARQARAGGGGSKI
PNIGNVMNKFEILGVVGEGAYGVVLKCRHKETHEIVAIKKFKDSEENEEVKETTLRELKMLRT
LKQENIVELKEAFRRRGKLYLVFEYVEKNMLELLEEMPNGVPPEKVKSYIYQLIKAIHWCHKN
DIVHRDIKPENLLISHNDVLKLCDFGFARNLSEGNNANYTEYVATRWYRSPELLLGAPYGKSV
DMWSVGCILGELSDGQPLFPGESEIDQLFTIQKVLGPLPSEQMKLFYSNPRFHGLRFPAVNHP
QSLERRYLGILNSVLLDLMKNLLKLDPADRYLTEQCLNHPTFQTQRLLDRSPSRSAKRKPYHV
ESSTLSNRNQAGKSTALQSHHRSNSKDIQNLSVGLPRADEGLPANESFLNGNLAGASLSPLHT
KTYQASSQPGSTSKDLTNNNIPHLLSPKEAKSKTEFDFNIDPKPSEGPGTKYLKSNSRSQQNR
HSFMESSQSKAGTLQPNEKQSRHSYIDTIPQSSRSPSYRTKAKSHGALSDSKSVSNLSEARAQ
IAEPSTSRYFPSSCLDLNSPTSPTPTRHSDTRTLLSPSGRNNRNEGTLDSRRTTTRHSKTMEE
LKLPEHMDSSHSHSLSAPHESFSYGLGYTSPFSSQQRPHRHSMYVTRDKVRAKGLDGSLSIGQ
GMAARANSLQLLSPQPGEQLPPEMTVARSSVKETSREGTSSFHTRQKSEGGVYHDPHSDDGTA
PKENRHLYNDPVPRRVGSFYRVPSPRPDNSFHENNVSTRVSSLPSESSSGTNHSKRQPAFDPW
KSPENISHSEQLKEKEKQGFFRSMKKKKKKSQTVPNSDSPDLLTLQKSIHSASTPSSRPKEWR
PEKISDLQTQSQPLKSLRKLLHLSSASNHPASSDPRFQPLTAQQTKNSFSEIRIHPLSQASGG
SSNIRQEPAPKGRPALQLPGQMDPGWHVSSVTRSATEGPSYSEQLGAKSGPNGHPYNRTNRSR

[chemical structure]

-GST-P-TATκ28-CDKL5_107-P-FH_pVL1393 (insect)
SEQ ID NO: 83
MSPILGYWKIKGLVQPTRLLLEYLEEKYEEHLYERDEGDKWRNKKFELGLEFPNLPYYIDGDV
KLTQSMAIIRYIADKHNMLGGCPKERAEISMLEGAVLDIRYGVSRIAYSKDFETLKVDFLSKL
PEMLKMFEDRLCHKTYLNGDHVTHPDFMLYDALDVVLYMDPMCLDAFPKLVCFKKRIEAIPQI
DKYLKSSKYIAWPLQGWQATFGGGDHPPKSGGGGSLEVLFQGPDAAQPARRARRTKLAAYARK
AARQARAGGGGSKIPNIGNVMNKFEILGVVGEGAYGVVLKCRHKETHEIVAIKKFKDSEENEE
VKETTLRELKMLRTLKQENIVELKEAFRRRGKLYLVFEYVEKNMLELLEEMPNGVPPEKVKSY
lYQLIKAIHWCHKNDIVHRDIKPENLLISHNDVLKLCDFGFARNLSEGNNANYTEYVATRWYR
SPELLLGAPYGKSVDMWSVGCILGELSDGQPLFPGESEIDQLFTIQKVLGPLPSEQMKLFYSN
PRFHGLRFPAVNHPQSLERRYLGILNSVLLDLMKNLLKLDPADRYLTEQCLNHPTFQTQRLLD
RSPSRSAKRKPYHVESSTLSNRNQAGKSTALQSHHRSNSKDIQNLSVGLPRADEGLPANESFL
NGNLAGASLSPLHTKTYQASSQPGSTSKDLTNNNIPHLLSPKEAKSKTEFDFNIDPKPSEGPG
TKYLKSNSRSQQNRHSFMESSQSKAGTLQPNEKQSRHSYIDTIPQSSRSPSYRTKAKSHGALS
DSKSVSNLSEARAQIAEPSTSRYFPSSCLDLNSPTSPTPTRHSDTRTLLSPSGRNNRNEGTLD
SRRTTTRHSKTMEELKLPEHMDSSHSHSLSAPHESFSYGLGYTSPFSSQQRPHRHSMYVTRDK
VRAKGLDGSLSIGQGMAARANSLQLLSPQPGEQLPPEMTVARSSVKETSREGTSSFHTRQKSE
GGVYHDPHSDDGTAPKENRHLYNDPVPRRVGSFYRVPSPRPDNSFHENNVSTRVSSLPSESSS
GTNHSKRQPAFDPWKSPENISHSEQLKEKEKQGFFRSMKKKKKKSQTVPNSDSPDLLTLQKSI
HSASTPSSRPKEWRPEKISDLQTQSQPLKSLRKLLHLSSASNHPASSDPRFQPLTAQQTKNSF
SEIRIHPLSQASGGSSNIRQEPAPKGRPALQLPGQMDPGWHVSSVTRSATEGPSYSEQLGAKS

[chemical structure]

APHHHHHH*
-GST-P-TATκ11-CDKL5_107-P-FH_pVL1393 (insect)
SEQ ID NO: 84
MSPILGYWKIKGLVQPTRLLLEYLEEKYEEHLYERDEGDKWRNKKFELGLEFPNLPYYIDGDV
KLTQSMAIIRYIADKHNMLGGCPKERAEISMLEGAVLDIRYGVSRIAYSKDFETLKVDFLSKL
PEMLKMFEDRLCHKTYLNGDHVTHPDFMLYDALDVVLYMDPMCLDAFPKLVCFKKRIEAIPQI
DKYLKSSKYIAWPLQGWQATFGGGDHPPKSGGGGSLEVLFQGPYARKAARQARAGGGGSKIPN
IGNVMNKFEILGVVGEGAYGVVLKCRHKETHEIVAIKKFKDSEENEEVKETTLRELKMLRTLK
QENIVELKEAFRRRGKLYLVFEYVEKNMLELLEEMPNGVPPEKVKSYIYQLIKAIHWCHKNDI
VHRDIKPENLLISHNDVLKLCDFGFARNLSEGNNANYTEYVATRWYRSPELLLGAPYGKSVDM
WSVGCILGELSDGQPLFPGESEIDQLFTIQKVLGPLPSEQMKLFYSNPRFHGLRFPAVNHPQS
LERRYLGILNSVLLDLMKNLLKLDPADRYLTEQCLNHPTFQTQRLLDRSPSRSAKRKPYHVES
STLSNRNQAGKSTALQSHHRSNSKDIQNLSVGLPRADEGLPANESFLNGNLAGASLSPLHTKT
YQASSQPGSTSKDLTNNNIPHLLSPKEAKSKTEFDFNIDPKPSEGPGTKYLKSNSRSQQNRHS
FMESSQSKAGTLQPNEKQSRHSYIDTIPQSSRSPSYRTKAKSHGALSDSKSVSNLSEARAQIA
EPSTSRYFPSSCLDLNSPTSPTPTRHSDTRTLLSPSGRNNRNEGTLDSRRTTTRHSKTMEELK
LPEHMDSSHSHSLSAPHESFSYGLGYTSPFSSQQRPHRHSMYVTRDKVRAKGLDGSLSIGQGM
AARANSLQLLSPQPGEQLPPEMTVARSSVKETSREGTSSFHTRQKSEGGVYHDPHSDDGTAPK
ENRHLYNDPVPRRVGSFYRVPSPRPDNSFHENNVSTRVSSLPSESSSGTNHSKRQPAFDPWKS
PENISHSEQLKEKEKQGFFRSMKKKKKKSQTVPNSDSPDLLTLQKSIHSASTPSSRPKEWRPE
KISDLQTQSQPLKSLRKLLHLSSASNHPASSDPRFQPLTAQQTKNSFSEIRIHPLSQASGGSS
NIRQEPAPKGRPALQLPGQMDPGWHVSSVTRSATEGPSYSEQLGAKSGPNGHPYNRTNRSRMP

[chemical structure]

-GST-P-TAT28-CDKL5_107-P-FH_pVL1393 (insect)
SEQ ID NO: 85
MSPILGYWKIKGLVQPTRLLLEYLEEKYEEHLYERDEGDKWRNKKFELGLEFPNLPYYIDGDV
KLTQSMAIIRYIADKHNMLGGCPKERAEISMLEGAVLDIRYGVSRIAYSKDFETLKVDFLSKL
PEMLKMFEDRLCHKTYLNGDHVTHPDFMLYDALDVVLYMDPMCLDAFPKLVCFKKRIEAIPQI
DKYLKSSKYIAWPLQGWQATFGGGDHPPKSGGGGSLEVLFQGPDAAQPARRARRTKLAAYGRK
KRRQRRRGGGGSKIPNIGNVMNKFEILGVVGEGAYGVVLKCRHKETHEIVAIKKFKDSEENEE
VKETTLRELKMLRTLKQENIVELKEAFRRRGKLYLVFEYVEKNMLELLEEMPNGVPPEKVKSY
IYQLIKAIHWCHKNDIVHRDIKPENLLISHNDVLKLCDFGFARNLSEGNNANYTEYVATRWYR
SPELLLGAPYGKSVDMWSVGCILGELSDGQPLFPGESEIDQLFTIQKVLGPLPSEQMKLFYSN
PRFHGLRFPAVNHPQSLERRYLGILNSVLLDLMKNLLKLDPADRYLTEQCLNHPTFQTQRLLD
RSPSRSAKRKPYHVESSTLSNRNQAGKSTALQSHHRSNSKDIQNLSVGLPRADEGLPANESFL
NGNLAGASLSPLHTKTYQASSQPGSTSKDLTNNNIPHLLSPKEAKSKTEFDFNIDPKPSEGPG
TKYLKSNSRSQQNRHSFMESSQSKAGTLQPNEKQSRHSYIDTIPQSSRSPSYRTKAKSHGALS
DSKSVSNLSEARAQIAEPSTSRYFPSSCLDLNSPTSPTPTRHSDTRTLLSPSGRNNRNEGTLD
SRRTTTRHSKTMEELKLPEHMDSSHSHSLSAPHESFSYGLGYTSPFSSQQRPHRHSMYVTRDK
VRAKGLDGSLSIGQGMAARANSLQLLSPQPGEQLPPEMTVARSSVKETSREGTSSFHTRQKSE
GGVYHDPHSDDGTAPKENRHLYNDPVPRRVGSFYRVPSPRPDNSFHENNVSTRVSSLPSESSS
GTNHSKRQPAFDPWKSPENISHSEQLKEKEKQGFFRSMKKKKKKSQTVPNSDSPDLLTLQKSI
HSASTPSSRPKEWRPEKISDLQTQSQPLKSLRKLLHLSSASNHPASSDPRFQPLTAQQTKNSF
SEIRIHPLSQASGGSSNIRQEPAPKGRPALQLPGQMDPGWHVSSVTRSATEGPSYSEQLGAKS

[chemical structure]

APHHHHHH*
-GST-P-TATil-CDKL5_107-P-FH_pVL1393 (insect)
SEQ ID NO: 86
MSPILGYWKIKGLVQPTRLLLEYLEEKYEEHLYERDEGDKWRNKKFELGLEFPNLPYYIDGDV
KLTQSMAIIRYIADKHNMLGGCPKERAEISMLEGAVLDIRYGVSRIAYSKDFETLKVDFLSKL
PEMLKMFEDRLCHKTYLNGDHVTHPDFMLYDALDVVLYMDPMCLDAFPKLVCFKKRIEAIPQI
DKYLKSSKYIAWPLQGWQATFGGGDHPPKSGGGGSLEVLFQGPYGRKKRRQRRRGGGGSKIPN
IGNVMNKFEILGVVGEGAYGVVLKCRHKETHEIVAIKKFKDSEENEEVKETTLRELKMLRTLK
QENIVELKEAFRRRGKLYLVFEYVEKNMLELLEEMPNGVPPEKVKSYIYQLIKAIHWCHKNDI
VHRDIKPENLLISHNDVLKLCDFGFARNLSEGNNANYTEYVATRWYRSPELLLGAPYGKSVDM
WSVGCILGELSDGQPLFPGESEIDQLFTIQKVLGPLPSEQMKLEYSNPRFHGLRFPAVNHPQS
LERRYLGILNSVLLDLMKNLLKLDPADRYLTEQCLNHPTFQTQRLLDRSPSRSAKRKPYHVES
STLSNRNQAGKSTALQSHHRSNSKDIQNLSVGLPRADEGLPANESFLNGNLAGASLSPLHTKT
YQASSQPGSTSKDLTNNNIPHLLSPKEAKSKTEFDFNIDPKPSEGPGTKYLKSNSRSQQNRHS
FMESSQSKAGTLQPNEKQSRHSYIDTIPQSSRSPSYRTKAKSHGALSDSKSVSNLSEARAQIA
EPSTSRYFPSSCLDLNSPTSPTPTRHSDTRTLLSPSGRNNRNEGTLDSRRTTTRHSKTMEELK
LPEHMDSSHSHSLSAPHESFSYGLGYTSPFSSQQRPHRHSMYVTRDKVRAKGLDGSLSIGQGM
AARANSLQLLSPQPGEQLPPEMTVARSSVKETSREGTSSFHTRQKSEGGVYHDPHSDDGTAPK
ENRHLYNDPVPRRVGSFYRVPSPRPDNSFHENNVSTRVSSLPSESSSGTNHSKRQPAFDPWKS
PENISHSEQLKEKEKQGFFRSMKKKKKKSQTVPNSDSPDLLTLQKSIHSASTPSSRPKEWRPE
KISDLQTQSQPLKSLRKLLHLSSASNHPASSDPRFQPLTAQQTKNSFSEIRIHPLSQASGGSS
NIRQEPAPKGRPALQLPGQMDPGWHVSSVTRSATEGPSYSEQLGAKSGPNGHPYNRTNRSRMP

[chemical structure]

-GST-P-ANTP-CDKL5_107-P-FH_pVL1393 (insect)
SEQ ID NO: 87
MSPILGYWKIKGLVQPTRLLLEYLEEKYEEHLYERDEGDKWRNKKFELGLEFPNLPYYIDGDV
KLTQSMAIIRYIADKHNMLGGCPKERAEISMLEGAVLDIRYGVSRIAYSKDFETLKVDFLSKL
PEMLKMFEDRLCHKTYLNGDHVTHPDFMLYDALDVVLYMDPMCLDAFPKLVCFKKRIEAIPQI
DKYLKSSKYIAWPLQGWQATFGGGDHPPKSGGGGSLEVLFQGPRQIKIWFQNRRMKWKKGGGG
SKIPNIGNVMNKFEILGVVGEGAYGVVLKCRHKETHEIVAIKKFKDSEENEEVKETTLRELKM
LRTLKQENIVELKEAFRRRGKLYLVFEYVEKNMLELLEEMPNGVPPEKVKSYIYQLIKAIHWC
HKNDIVHRDIKPENLLISHNDVLKLCDFGFARNLSEGNNANYTEYVATRWYRSPELLLGAPYG
KSVDMWSVGCILGELSDGQPLFPGESEIDQLFTIQKVLGPLPSEQMKLFYSNPRFHGLRFPAV
NHPQSLERRYLGILNSVLLDLMKNLLKLDPADRYLTEQCLNHPTFQTQRLLDRSPSRSAKRKP
YHVESSTLSNRNQAGKSTALQSHHRSNSKDIQNLSVGLPRADEGLPANESFLNGNLAGASLSP
LHTKTYQASSQPGSTSKDLTNNNIPHLLSPKEAKSKTEFDFNIDPKPSEGPGTKYLKSNSRSQ
QNRHSFMESSQSKAGTLQPNEKQSRHSYIDTIPQSSRSPSYRTKAKSHGALSDSKSVSNLSEA
RAQIAEPSTSRYFPSSCLDLNSPTSPTPTRHSDTRTLLSPSGRNNRNEGTLDSRRTTTRHSKT
MEELKLPEHMDSSHSHSLSAPHESFSYGLGYTSPFSSQQRPHRHSMYVTRDKVRAKGLDGSLS
IGQGMAARANSLQLLSPQPGEQLPPEMTVARSSVKETSREGTSSFHTRQKSEGGVYHDPHSDD
GTAPKENRHLYNDPVPRRVGSFYRVPSPRPDNSFHENNVSTRVSSLPSESSSGTNHSKRQPAF
DPWKSPENISHSEQLKEKEKQGFFRSMKKKKKKSQTVPNSDSPDLLTLQKSIHSASTPSSRPK
EWRPEKISDLQTQSQPLKSLRKLLHLSSASNHPASSDPRFQPLTAQQTKNSFSEIRIHPLSQA
SGGSSNIRQEPAPKGRPALQLPGQMDPGWHVSSVTRSATEGPSYSEQLGAKSGPNGHPYNRTN

[chemical structure]

-GST-P-TRANSP-CDKL5_107-P-FH_pVL1393 (insect)
SEQ ID NO: 88
MSPILGYWKIKGLVQPTRLLLEYLEEKYEEHLYERDEGDKWRNKKFELGLEFPNLPYYIDGDV
KLTQSMAIIRYIADKHNMLGGCPKERAEISMLEGAVLDIRYGVSRIAYSKDFETLKVDFLSKL
PEMLKMFEDRLCHKTYLNGDHVTHPDFMLYDALDVVLYMDPMCLDAFPKLVCFKKRIEAIPQI
DKYLKSSKYIAWPLQGWQATFGGGDHPPKSGGGGSLEVLFQGPAGYLLGKINLKALAALAKKI
LGGGGSKIPNIGNVMNKFEILGVVGEGAYGVVLKCRHKETHEIVAIKKFKDSEENEEVKETTL
RELKMLRTLKQENIVELKEAFRRRGKLYLVFEYVEKNMLELLEEMPNGVPPEKVKSYIYQLIK
AIHWCHKNDIVHRDIKPENLLISHNDVLKLCDFGFARNLSEGNNANYTEYVATRWYRSPELLL
GAPYGKSVDMWSVGCILGELSDGQPLFPGESEIDQLFTIQKVLGPLPSEQMKLFYSNPRFHGL
RFPAVNHPQSLERRYLGILNSVLLDLMKNLLKLDPADRYLTEQCLNHPTFQTQRLLDRSPSRS
AKRKPYHVESSTLSNRNQAGKSTALQSHHRSNSKDIQNLSVGLPRADEGLPANESFLNGNLAG
ASLSPLHTKTYQASSQPGSTSKDLTNNNIPHLLSPKEAKSKTEFDFNIDPKPSEGPGTKYLKS
NSRSQQNRHSFMESSQSKAGTLQPNEKQSRHSYIDTIPQSSRSPSYRTKAKSHGALSDSKSVS
NLSEARAQIAEPSTSRYFPSSCLDLNSPTSPTPTRHSDTRTLLSPSGRNNRNEGTLDSRRTTT
RHSKTMEELKLPEHMDSSHSHSLSAPHESFSYGLGYTSPFSSQQRPHRHSMYVTRDKVRAKGL
DGSLSIGQGMAARANSLQLLSPQPGEQLPPEMTVARSSVKETSREGTSSFHTRQKSEGGVYHD
PHSDDGTAPKENRHLYNDPVPRRVGSFYRVPSPRPDNSFHENNVSTRVSSLPSESSSGTNHSK
RQPAFDPWKSPENISHSEQLKEKEKQGFFRSMKKKKKKSQTVPNSDSPDLLTLQKSIHSASTP
SSRPKEWRPEKISDLQTQSQPLKSLRKLLHLSSASNHPASSDPRFQPLTAQQTKNSFSEIRIH
PLSQASGGSSNIRQEPAPKGRPALQLPGQMDPGWHVSSVTRSATEGPSYSEQLGAKSGPNGHP

[chemical structure]

HH*
-GST-P-P97P-CDKL5_107-P-FH_pVL1393 (insect)
SEQ ID NO: 89
MSPILGYWKIKGLVQPTRLLLEYLEEKYEEHLYERDEGDKWRNKKFELGLEFPNLPYYIDGDV
KLTQSMAIIRYIADKHNMLGGCPKERAEISMLEGAVLDIRYGVSRIAYSKDFETLKVDFLSKL
PEMLKMFEDRLCHKTYLNGDHVTHPDFMLYDALDVVLYMDPMCLDAFPKLVCFKKRIEAIPQI
DKYLKSSKYIAWPLQGWQATFGGGDHPPKSGGGGSLEVLFQGPDSSHAFTLDELRGGGGSKIP
NIGNVMNKFEILGVVGEGAYGVVLKCRHKETHEIVAIKKFKDSEENEEVKETTLRELKMLRTL
KQENIVELKEAFRRRGKLYLVFEYVEKNMLELLEEMPNGVPPEKVKSYIYQLIKAIHWCHKND
IVHRDIKPENLLISHNDVLKLCDFGFARNLSEGNNANYTEYVATRWYRSPELLLGAPYGKSVD
MWSVGCILGELSDGQPLFPGESEIDQLFTIQKVLGPLPSEQMKLFYSNPRFHGLRFPAVNHPQ
SLERRYLGILNSVLLDLMKNLLKLDPADRYLTEQCLNHPTFQTQRLLDRSPSRSAKRKPYHVE
SSTLSNRNQAGKSTALQSHHRSNSKDIQNLSVGLPRADEGLPANESFLNGNLAGASLSPLHTK
TYQASSQPGSTSKDLTNNNIPHLLSPKEAKSKTEFDFNIDPKPSEGPGTKYLKSNSRSQQNRH
SFMESSQSKAGTLQPNEKQSRHSYIDTIPQSSRSPSYRTKAKSHGALSDSKSVSNLSEARAQI
AEPSTSRYFPSSCLDLNSPTSPTPTRHSDTRTLLSPSGRNNRNEGTLDSRRTTTRHSKTMEEL
KLPEHMDSSHSHSLSAPHESFSYGLGYTSPFSSQQRPHRHSMYVTRDKVRAKGLDGSLSIGQG
MAARANSLQLLSPQPGEQLPPEMTVARSSVKETSREGTSSFHTRQKSEGGVYHDPHSDDGTAP
KENRHLYNDPVPRRVGSFYRVPSPRPDNSFHENNVSTRVSSLPSESSSGTNHSKRQPAFDPWK
SPENISHSEQLKEKEKQGFFRSMKKKKKKSQTVPNSDSPDLLTLQKSIHSASTPSSRPKEWRP
EKISDLQTQSQPLKSLRKLLHLSSASNHPASSDPRFQPLTAQQTKNSFSEIRIHPLSQASGGS
SNIRQEPAPKGRPALQLPGQMDPGWHVSSVTRSATEGPSYSEQLGAKSGPNGHPYNRTNRSRM

[chemical structure]

-GST-P-eGFP-P-FH_pVL1393 (insect)
SEQ ID NO: 90
MSPILGYWKIKGLVQPTRLLLEYLEEKYEEHLYERDEGDKWRNKKFELGLEFPNLPYYIDGDV
KLTQSMAIIRYIADKHNMLGGCPKERAEISMLEGAVLDIRYGVSRIAYSKDFETLKVDFLSKL
PEMLKMFEDRLCHKTYLNGDHVTHPDFMLYDALDVVLYMDPMCLDAFPKLVCFKKRIEAIPQI

[chemical structure]

GDVNGHKFSVSGEGEGDATYGKLTLKFICTTGKLPVPWPTLVTTLTYGVQCFSRYPDHMKQHD
FFKSAMPEGYVQERTIFFKDDGNYKTRAEVKFEGDTLVNRIELKGIDFKEDGNILGHKLEYNY
NSHNVYIMADKQKNGIKVNFKIRHNIEDGSVQLADHYQQNTPIGDGPVLLPDNHYLSTQSALS

[chemical structure]

DKDGAPHHHHHH*
-GST-P-TATκ28-eGFP-P-FH_pVL1393 (insect)
SEQ ID NO: 91
MSPILGYWKIKGLVQPTRLLLEYLEEKYEEHLYERDEGDKWRNKKFELGLEFPNLPYYIDGDV
KLTQSMAIIRYIADKHNMLGGCPKERAEISMLEGAVLDIRYGVSRIAYSKDFETLKVDFLSKL
PEMLKMFEDRLCHKTYLNGDHVTHPDFMLYDALDVVLYMDPMCLDAFPKLVCFKKRIEAIPQI

[chemical structure]

AARQARAGGGGSMVSKGEELFTGVVPILVELDGDVNGHKFSVSGEGEGDATYGKLTLKFICTT
GKLPVPWPTLVTTLTYGVQCFSRYPDHMKQHDFFKSAMPEGYVQERTIFFKDDGNYKTRAEVK
FEGDTLVNRIELKGIDFKEDGNILGHKLEYNYNSHNVYIMADKQKNGIKVNFKIRHNIEDGSV

[chemical structure]

[chemical structure]


-GST-P-CDKL5_107-P-FH_pVL1393 (insect)
SEQ ID NO: 92
MSPILGYWKIKGLVQPTRLLLEYLEEKYEEHLYERDEGDKWRNKKFELGLEFPNLPYYIDGDV
KLTQSMAIIRYIADKHNMLGGCPKERAEISMLEGAVLDIRYGVSRIAYSKDFETLKVDFLSKL
PEMLKMFEDRLCHKTYLNGDHVTHPDFMLYDALDVVLYMDPMCLDAFPKLVCFKKRIEAIPQI
DKYLKSSKYIAWPLQGWQATFGGGDHPPKSGGGGSLEVLFQGPGKIPNIGNVMNKFEILGVVG
EGAYGVVLKCRHKETHEIVAIKKFKDSEENEEVKETTLRELKMLRTLKQENIVELKEAFRRRG
KLYLVFEYVEKNMLELLEEMPNGVPPEKVKSYIYQLIKAIHWCHKNDIVHRDIKPENLLISHN
DVLKLCDFGFARNLSEGNNANYTEYVATRWYRSPELLLGAPYGKSVDMWSVGCILGELSDGQP
LFPGESEIDQLFTIQKVLGPLPSEQMKLFYSNPRFHGLRFPAVNHPQSLERRYLGILNSVLLD
LMKNLLKLDPADRYLTEQCLNHPTFQTQRLLDRSPSRSAKRKPYHVESSTLSNRNQAGKSTAL
QSHHRSNSKDIQNLSVGLPRADEGLPANESFLNGNLAGASLSPLHTKTYQASSQPGSTSKDLT
NNNIPHLLSPKEAKSKTEFDFNIDPKPSEGPGTKYLKSNSRSQQNRHSFMESSQSKAGTLQPN
EKQSRHSYIDTIPQSSRSPSYRTKAKSHGALSDSKSVSNLSEARAQIAEPSTSRYFPSSCLDL
NSPTSPTPTRHSDTRTLLSPSGRNNRNEGTLDSRRTTTRHSKTMEELKLPEHMDSSHSHSLSA
PHESFSYGLGYTSPFSSQQRPHRHSMYVTRDKVRAKGLDGSLSIGQGMAARANSLQLLSPQPG
EQLPPEMTVARSSVKETSREGTSSFHTRQKSEGGVYHDPHSDDGTAPKENRHLYNDPVPRRVG
SFYRVPSPRPDNSFHENNVSTRVSSLPSESSSGTNHSKRQPAFDPWKSPENISHSEQLKEKEK
QGFFRSMKKKKKKSQTVPNSDSPDLLTLQKSIHSASTPSSRPKEWRPEKISDLQTQSQPLKSL
RKLLHLSSASNHPASSDPRFQPLTAQQTKNSFSEIRIHPLSQASGGSSNIRQEPAPKGRPALQ

[chemical structure]

LEVLFQGPDYKDHDGDYKDHDIDYKDDDDKDGAPHHHHHH*
MBip-TATκ28-CDKL5_107-FH_cho[1-7NQ]
SEQ ID NO: 93
MKLSLVAAMLLLLSLVAAMLLLLSAARAGDAAQPARRARRTKLAAYARKAARQARAGGGGSKI
PNIGNVMNKFEILGVVGEGAYGVVLKCRHKETHEIVAIKKFKDSEENEEVKETTLRELKMLRT
LKQENIVELKEAFRRRGKLYLVFEYVEKNMLELLEEMPNGVPPEKVKSYIYQLIKAIHWCHKN
DIVHRDIKPENLLISHNDVLKLCDFGFARQLSEGNNAQYTEYVATRWYRSPELLLGAPYGKSV
DMWSVGCILGELSDGQPLFPGESEIDQLFTIQKVLGPLPSEQMKLFYSNPRFHGLRFPAVNHP
QSLERRYLGILNSVLLDLMKNLLKLDPADRYLTEQCLNHPTFQTQRLLDRSPSRSAKRKPYHV
ESSTLSNRNQAGKSTALQSHHRSNSKDIQQLSVGLPRADEGLPANESFLNGNLAGASLSPLHT
KTYQASSQPGSTSKDLTNNNIPHLLSPKEAKSKTEFDFNIDPKPSEGPGTKYLKSNSRSQQNR
HSFMESSQSKAGTLQPNEKQSRHSYIDTIPQSSRSPSYRTKAKSHGALSDSKSVSQLSEARAQ
IAEPSTSRYFPSSCLDLNSPTSPTPTRHSDTRTLLSPSGRNNRNEGTLDSRRTTTRHSKTMEE
LKLPEHMDSSHSHSLSAPHESFSYGLGYTSPFSSQQRPHRHSMYVTRDKVRAKGLDGSLSIGQ
GMAARANSLQLLSPQPGEQLPPEMTVARSSVKETSREGTSSFHTRQKSEGGVYHDPHSDDGTA
PKENRHLYNDPVPRRVGSFYRVPSPRPDNSFHENNVSTRVSSLPSESSSGTNHSKRQPAFDPW
KSPEQISHSEQLKEKEKQGFFRSMKKKKKKSQTVPNSDSPDLLTLQKSIHSASTPSSRPKEWR
PEKISDLQTQSQPLKSLRKLLHLSSASNHPASSDPRFQPLTAQQTKNSFSEIRIHPLSQASGG
SSNIRQEPAPKGRPALQLPGQMDPGWHVSSVTRSATEGPSYSEQLGAKSGPNGHPYQRTQRSR

[chemical structure]

MBip-TATκ28-CDKL5_107-FH_cho[2-7NQ]
SEQ ID NO: 94
MKLSLVAAMLLLLSLVAAMLLLLSAARAGDAAQPARRARRTKLAAYARKAARQARAGGGGSKI
PNIGNVMNKFEILGVVGEGAYGVVLKCRHKETHEIVAIKKFKDSEENEEVKETTLRELKMLRT
LKQENIVELKEAFRRRGKLYLVFEYVEKNMLELLEEMPNGVPPEKVKSYIYQLIKAIHWCHKN
DIVHRDIKPENLLISHNDVLKLCDFGFARNLSEGNNAQYTEYVATRWYRSPELLLGAPYGKSV
DMWSVGCILGELSDGQPLFPGESEIDQLFTIQKVLGPLPSEQMKLFYSNPRFHGLRFPAVNHP
QSLERRYLGILNSVLLDLMKNLLKLDPADRYLTEQCLNHPTFQTQRLLDRSPSRSAKRKPYHV
ESSTLSNRNQAGKSTALQSHHRSNSKDIQQLSVGLPRADEGLPANESFLNGNLAGASLSPLHT
KTYQASSQPGSTSKDLTNNNIPHLLSPKEAKSKTEFDFNIDPKPSEGPGTKYLKSNSRSQQNR
HSFMESSQSKAGTLQPNEKQSRHSYIDTIPQSSRSPSYRTKAKSHGALSDSKSVSQLSEARAQ
IAEPSTSRYFPSSCLDLNSPTSPTPTRHSDTRTLLSPSGRNNRNEGTLDSRRTTTRHSKTMEE
LKLPEHMDSSHSHSLSAPHESFSYGLGYTSPFSSQQRPHRHSMYVTRDKVRAKGLDGSLSIGQ
GMAARANSLQLLSPQPGEQLPPEMTVARSSVKETSREGTSSFHTRQKSEGGVYHDPHSDDGTA
PKENRHLYNDPVPRRVGSFYRVPSPRPDNSFHENNVSTRVSSLPSESSSGTNHSKRQPAFDPW
KSPEQISHSEQLKEKEKQGFFRSMKKKKKKSQTVPNSDSPDLLTLQKSIHSASTPSSRPKEWR
PEKISDLQTQSQPLKSLRKLLHLSSASNHPASSDPRFQPLTAQQTKNSFSEIRIHPLSQASGG
SSNIRQEPAPKGRPALQLPGQMDPGWHVSSVTRSATEGPSYSEQLGAKSGPNGHPYQRTQRSR

[chemical structure]

MBip-TATκ28-CDKL5_107-FH_cho[1,3-7NQ]
SEQ ID NO: 95
MKLSLVAAMLLLLSLVAAMLLLLSAARAGDAAQPARRARRTKLAAYARKAARQARAGGGGSKI
PNIGNVMNKFEILGVVGEGAYGVVLKCRHKETHEIVAIKKFKDSEENEEVKETTLRELKMLRT
LKQENIVELKEAFRRRGKLYLVFEYVEKNMLELLEEMPNGVPPEKVKSYIYQLIKAIHWCHKN
DIVHRDIKPENLLISHNDVLKLCDFGFARQLSEGNNANYTEYVATRWYRSPELLLGAPYGKSV
DMWSVGCILGELSDGQPLFPGESEIDQLFTIQKVLGPLPSEQMKLFYSNPRFHGLRFPAVNHP
QSLERRYLGILNSVLLDLMKNLLKLDPADRYLTEQCLNHPTFQTQRLLDRSPSRSAKRKPYHV
ESSTLSNRNQAGKSTALQSHHRSNSKDIQQLSVGLPRADEGLPANESFLNGNLAGASLSPLHT
KTYQASSQPGSTSKDLTNNNIPHLLSPKEAKSKTEFDFNIDPKPSEGPGTKYLKSNSRSQQNR
HSFMESSQSKAGTLQPNEKQSRHSYIDTIPQSSRSPSYRTKAKSHGALSDSKSVSQLSEARAQ
IAEPSTSRYFPSSCLDLNSPTSPTPTRHSDTRTLLSPSGRNNRNEGTLDSRRTTTRHSKTMEE
LKLPEHMDSSHSHSLSAPHESFSYGLGYTSPFSSQQRPHRHSMYVTRDKVRAKGLDGSLSIGQ
GMAARANSLQLLSPQPGEQLPPEMTVARSSVKETSREGTSSFHTRQKSEGGVYHDPHSDDGTA
PKENRHLYNDPVPRRVGSFYRVPSPRPDNSFHENNVSTRVSSLPSESSSGTNHSKRQPAFDPW
KSPEQISHSEQLKEKEKQGFFRSMKKKKKKSQTVPNSDSPDLLTLQKSIHSASTPSSRPKEWR
PEKISDLQTQSQPLKSLRKLLHLSSASNHPASSDPRFQPLTAQQTKNSFSEIRIHPLSQASGG
SSNIRQEPAPKGRPALQLPGQMDPGWHVSSVTRSATEGPSYSEQLGAKSGPNGHPYQRTQRSR

[chemical structure]

MBip-TATκ28-CDKL5_107-FH_cho[1-2,4-7NQ]
SEQ ID NO: 96
MKLSLVAAMLLLLSLVAAMLLLLSAARAGDAAQPARRARRTKLAAYARKAARQARAGGGGSKI
PNIGNVMNKFEILGVVGEGAYGVVLKCRHKETHEIVAIKKFKDSEENEEVKETTLRELKMLRT
LKQENIVELKEAFRRRGKLYLVFEYVEKNMLELLEEMPNGVPPEKVKSYIYQLIKAIHWCHKN
DIVHRDIKPENLLISHNDVLKLCDFGFARQLSEGNNAQYTEYVATRWYRSPELLLGAPYGKSV
DMWSVGCILGELSDGQPLFPGESEIDQLFTIQKVLGPLPSEQMKLFYSNPRFHGLRFPAVNHP
QSLERRYLGILNSVLLDLMKNLLKLDPADRYLTEQCLNHPTFQTQRLLDRSPSRSAKRKPYHV
ESSTLSNRNQAGKSTALQSHHRSNSKDIQNLSVGLPRADEGLPANESFLNGNLAGASLSPLHT
KTYQASSQPGSTSKDLTNNNIPHLLSPKEAKSKTEFDFNIDPKPSEGPGTKYLKSNSRSQQNR
HSFMESSQSKAGTLQPNEKQSRHSYIDTIPQSSRSPSYRTKAKSHGALSDSKSVSQLSEARAQ
IAEPSTSRYFPSSCLDLNSPTSPTPTRHSDTRTLLSPSGRNNRNEGTLDSRRTTTRHSKTMEE
LKLPEHMDSSHSHSLSAPHESFSYGLGYTSPFSSQQRPHRHSMYVTRDKVRAKGLDGSLSIGQ
GMAARANSLQLLSPQPGEQLPPEMTVARSSVKETSREGTSSFHTRQKSEGGVYHDPHSDDGTA
PKENRHLYNDPVPRRVGSFYRVPSPRPDNSFHENNVSTRVSSLPSESSSGTNHSKRQPAFDPW
KSPEQISHSEQLKEKEKQGFFRSMKKKKKKSQTVPNSDSPDLLTLQKSIHSASTPSSRPKEWR
PEKISDLQTQSQPLKSLRKLLHLSSASNHPASSDPRFQPLTAQQTKNSFSEIRIHPLSQASGG
SSNIRQEPAPKGRPALQLPGQMDPGWHVSSVTRSATEGPSYSEQLGAKSGPNGHPYQRTQRSR

[chemical structure]

MBip-TATκ28-CDKL5_107-FH_cho[1-3,5-7NQ]
SEQ ID NO: 97
MKLSLVAAMLLLLSLVAAMLLLLSAARAGDAAQPARRARRTKLAAYARKAARQARAGGGGSKI
PNIGNVMNKFEILGVVGEGAYGVVLKCRHKETHEIVAIKKFKDSEENEEVKETTLRELKMLRT
LKQENIVELKEAFRRRGKLYLVFEYVEKNMLELLEEMPNGVPPEKVKSYIYQLIKAIHWCHKN
DIVHRDIKPENLLISHNDVLKLCDFGFARQLSEGNNAQYTEYVATRWYRSPELLLGAPYGKSV
DMWSVGCILGELSDGQPLFPGESEIDQLFTIQKVLGPLPSEQMKLFYSNPRFHGLRFPAVNHP
QSLERRYLGILNSVLLDLMKNLLKLDPADRYLTEQCLNHPTFQTQRLLDRSPSRSAKRKPYHV
ESSTLSNRNQAGKSTALQSHHRSNSKDIQQLSVGLPRADEGLPANESFLNGNLAGASLSPLHT
KTYQASSQPGSTSKDLTNNNIPHLLSPKEAKSKTEFDFNIDPKPSEGPGTKYLKSNSRSQQNR
HSFMESSQSKAGTLQPNEKQSRHSYIDTIPQSSRSPSYRTKAKSHGALSDSKSVSNLSEARAQ
IAEPSTSRYFPSSCLDLNSPTSPTPTRHSDTRTLLSPSGRNNRNEGTLDSRRTTTRHSKTMEE
LKLPEHMDSSHSHSLSAPHESFSYGLGYTSPFSSQQRPHRHSMYVTRDKVRAKGLDGSLSIGQ
GMAARANSLQLLSPQPGEQLPPEMTVARSSVKETSREGTSSFHTRQKSEGGVYHDPHSDDGTA
PKENRHLYNDPVPRRVGSFYRVPSPRPDNSFHENNVSTRVSSLPSESSSGTNHSKRQPAFDPW
KSPEQISHSEQLKEKEKQGFFRSMKKKKKKSQTVPNSDSPDLLTLQKSIHSASTPSSRPKEWR
PEKISDLQTQSQPLKSLRKLLHLSSASNHPASSDPRFQPLTAQQTKNSFSEIRIHPLSQASGG
SSNIRQEPAPKGRPALQLPGQMDPGWHVSSVTRSATEGPSYSEQLGAKSGPNGHPYQRTQRSR

[chemical structure]

MBip-TATκ28-CDKL5_l07-FH_cho[1-4,6-7NQ]
SEQ ID NO: 98
MKLSLVAAMLLLLSLVAAMLLLLSAARAGDAAQPARRARRTKLAAYARKAARQARAGGGGSKI
PNIGNVMNKFEILGVVGEGAYGVVLKCRHKETHEIVAIKKFKDSEENEEVKETTLRELKMLRT
LKQENIVELKEAFRRRGKLYLVFEYVEKNMLELLEEMPNGVPPEKVKSYIYQLIKAIHWCHKN
DIVHRDIKPENLLISHNDVLKLCDFGFARQLSEGNNAQYTEYVATRWYRSPELLLGAPYGKSV
DMWSVGCILGELSDGQPLFPGESEIDQLFTIQKVLGPLPSEQMKLFYSNPRFHGLRFPAVNHP
QSLERRYLGILNSVLLDLMKNLLKLDPADRYLTEQCLNHPTFQTQRLLDRSPSRSAKRKPYHV
ESSTLSNRNQAGKSTALQSHHRSNSKDIQQLSVGLPRADEGLPANESFLNGNLAGASLSPLHT
KTYQASSQPGSTSKDLTNNNIPHLLSPKEAKSKTEFDFNIDPKPSEGPGTKYLKSNSRSQQNR
HSFMESSQSKAGTLQPNEKQSRHSYIDTIPQSSRSPSYRTKAKSHGALSDSKSVSQLSEARAQ
IAEPSTSRYFPSSCLDLNSPTSPTPTRHSDTRTLLSPSGRNNRNEGTLDSRRTTTRHSKTMEE
LKLPEHMDSSHSHSLSAPHESFSYGLGYTSPFSSQQRPHRHSMYVTRDKVRAKGLDGSLSIGQ
GMAARANSLQLLSPQPGEQLPPEMTVARSSVKETSREGTSSFHTRQKSEGGVYHDPHSDDGTA
PKENRHLYNDPVPRRVGSFYRVPSPRPDNSFHENNVSTRVSSLPSESSSGTNHSKRQPAFDPW
KSPENISHSEQLKEKEKQGFFRSMKKKKKKSQTVPNSDSPDLLTLQKSIHSASTPSSRPKEWR
PEKISDLQTQSQPLKSLRKLLHLSSASNHPASSDPRFQPLTAQQTKNSFSEIRIHPLSQASGG
SSNIRQEPAPKGRPALQLPGQMDPGWHVSSVTRSATEGPSYSEQLGAKSGPNGHPYQRTQRSR

[chemical structure]

MBip-TATκ28-CDKL5_107-FH_cho[1-5,7NQ]
SEQ ID NO: 99
MKLSLVAAMLLLLSLVAAMLLLLSAARAGDAAQPARRARRTKLAAYARKAARQARAGGGGSKI
PNIGNVMNKFEILGVVGEGAYGVVLKCRHKETHEIVAIKKFKDSEENEEVKETTLRELKMLRT
LKQENIVELKEAFRRRGKLYLVFEYVEKNMLELLEEMPNGVPPEKVKSYIYQLIKAIHWCHKN
DIVHRDIKPENLLISHNDVLKLCDFGFARQLSEGNNAQYTEYVATRWYRSPELLLGAPYGKSV
DMWSVGCILGELSDGQPLFPGESEIDQLFTIQKVLGPLPSEQMKLFYSNPRFHGLRFPAVNHP
QSLERRYLGILNSVLLDLMKNLLKLDPADRYLTEQCLNHPTFQTQRLLDRSPSRSAKRKPYHV
ESSTLSNRNQAGKSTALQSHHRSNSKDIQQLSVGLPRADEGLPANESFLNGNLAGASLSPLHT
KTYQASSQPGSTSKDLTNNNIPHLLSPKEAKSKTEFDFNIDPKPSEGPGTKYLKSNSRSQQNR
HSFMESSQSKAGTLQPNEKQSRHSYIDTIPQSSRSPSYRTKAKSHGALSDSKSVSQLSEARAQ
IAEPSTSRYFPSSCLDLNSPTSPTPTRHSDTRTLLSPSGRNNRNEGTLDSRRTTTRHSKTMEE
LKLPEHMDSSHSHSLSAPHESFSYGLGYTSPFSSQQRPHRHSMYVTRDKVRAKGLDGSLSIGQ
GMAARANSLQLLSPQPGEQLPPEMTVARSSVKETSREGTSSFHTRQKSEGGVYHDPHSDDGTA
PKENRHLYNDPVPRRVGSFYRVPSPRPDNSFHENNVSTRVSSLPSESSSGTNHSKRQPAFDPW
KSPEQISHSEQLKEKEKQGFFRSMKKKKKKSQTVPNSDSPDLLTLQKSIHSASTPSSRPKEWR
PEKISDLQTQSQPLKSLRKLLHLSSASNHPASSDPRFQPLTAQQTKNSFSEIRIHPLSQASGG
SSNIRQEPAPKGRPALQLPGQMDPGWHVSSVTRSATEGPSYSEQLGAKSGPNGHPYNRTQRSR

[chemical structure]

MBip-TATκ28-CDKL5_107-FH_cho[1-6NQ]
SEQ ID NO: 100
MKLSLVAAMLLLLSLVAAMLLLLSAARAGDAAQPARRARRTKLAAYARKAARQARAGGGGSKI
PNIGNVMNKFEILGVVGEGAYGVVLKCRHKETHEIVAIKKFKDSEENEEVKETTLRELKMLRT
LKQENIVELKEAFRRRGKLYLVFEYVEKNMLELLEEMPNGVPPEKVKSYIYQLIKAIHWCHKN
DIVHRDIKPENLLISHNDVLKLCDFGFARQLSEGNNAQYTEYVATRWYRSPELLLGAPYGKSV
DMWSVGCILGELSDGQPLFPGESEIDQLFTIQKVLGPLPSEQMKLFYSNPRFHGLRFPAVNHP
QSLERRYLGILNSVLLDLMKNLLKLDPADRYLTEQCLNHPTFQTQRLLDRSPSRSAKRKPYHV
ESSTLSNRNQAGKSTALQSHHRSNSKDIQQLSVGLPRADEGLPANESFLNGNLAGASLSPLHT
KTYQASSQPGSTSKDLTNNNIPHLLSPKEAKSKTEFDFNIDPKPSEGPGTKYLKSNSRSQQNR
HSFMESSQSKAGTLQPNEKQSRHSYIDTIPQSSRSPSYRTKAKSHGALSDSKSVSQLSEARAQ
IAEPSTSRYFPSSCLDLNSPTSPTPTRHSDTRTLLSPSGRNNRNEGTLDSRRTTTRHSKTMEE
LKLPEHMDSSHSHSLSAPHESFSYGLGYTSPFSSQQRPHRHSMYVTRDKVRAKGLDGSLSIGQ
GMAARANSLQLLSPQPGEQLPPEMTVARSSVKETSREGTSSFHTRQKSEGGVYHDPHSDDGTA
PKENRHLYNDPVPRRVGSFYRVPSPRPDNSFHENNVSTRVSSLPSESSSGTNHSKRQPAFDPW
KSPEQISHSEQLKEKEKQGFFRSMKKKKKKSQTVPNSDSPDLLTLQKSIHSASTPSSRPKEWR
PEKISDLQTQSQPLKSLRKLLHLSSASNHPASSDPRFQPLTAQQTKNSFSEIRIHPLSQASGG
SSNIRQEPAPKGRPALQLPGQMDPGWHVSSVTRSATEGPSYSEQLGAKSGPNGHPYQRTNRSR

[chemical structure]

MBip-TATκ28-CDKL5_107-FH_cho[2NQ]
SEQ ID NO: 101
MKLSLVAAMLLLLSLVAAMLLLLSAARAGDAAQPARRARRTKLAAYARKAARQARAGGGGSKI
PNIGNVMNKFEILGVVGEGAYGVVLKCRHKETHEIVAIKKFKDSEENEEVKETTLRELKMLRT
LKQENIVELKEAFRRRGKLYLVFEYVEKNMLELLEEMPNGVPPEKVKSYIYQLIKAIHWCHKN
DIVHRDIKPENLLISHNDVLKLCDFGFARNLSEGNNAQYTEYVATRWYRSPELLLGAPYGKSV
DMWSVGCILGELSDGQPLFPGESEIDQLFTIQKVLGPLPSEQMKLFYSNPRFHGLRFPAVNHP
QSLERRYLGILNSVLLDLMKNLLKLDPADRYLTEQCLNHPTFQTQRLLDRSPSRSAKRKPYHV
ESSTLSNRNQAGKSTALQSHHRSNSKDIQNLSVGLPRADEGLPANESFLNGNLAGASLSPLHT
KTYQASSQPGSTSKDLTNNNIPHLLSPKEAKSKTEFDFNIDPKPSEGPGTKYLKSNSRSQQNR
HSFMESSQSKAGTLQPNEKQSRHSYIDTIPQSSRSPSYRTKAKSHGALSDSKSVSNLSEARAQ
IAEPSTSRYFPSSCLDLNSPTSPTPTRHSDTRTLLSPSGRNNRNEGTLDSRRTTTRHSKTMEE
LKLPEHMDSSHSHSLSAPHESFSYGLGYTSPFSSQQRPHRHSMYVTRDKVRAKGLDGSLSIGQ
GMAARANSLQLLSPQPGEQLPPEMTVARSSVKETSREGTSSFHTRQKSEGGVYHDPHSDDGTA
PKENRHLYNDPVPRRVGSFYRVPSPRPDNSFHENNVSTRVSSLPSESSSGTNHSKRQPAFDPW
KSPENISHSEQLKEKEKQGFFRSMKKKKKKSQTVPNSDSPDLLTLQKSIHSASTPSSRPKEWR
PEKISDLQTQSQPLKSLRKLLHLSSASNHPASSDPRFQPLTAQQTKNSFSEIRIHPLSQASGG
SSNIRQEPAPKGRPALQLPGQMDPGWHVSSVTRSATEGPSYSEQLGAKSGPNGHPYNRTNRSR

[chemical structure]

MBip-TATκ28-CDKL5_107-FH_cho[1-10NQ]
SEQ ID NO: 102
MKLSLVAAMLLLLSLVAAMLLLLSAARAGDAAQPARRARRTKLAAYARKAARQARAGGGGSKI
PNIGNVMNKFEILGVVGEGAYGVVLKCRHKETHEIVAIKKFKDSEENEEVKETTLRELKMLRT
LKQENIVELKEAFRRRGKLYLVFEYVEKNMLELLEEMPNGVPPEKVKSYIYQLIKAIHWCHKN
DIVHRDIKPENLLISHNDVLKLCDFGFARQLSEGNNAQYTEYVATRWYRSPELLLGAPYGKSV
DMWSVGCILGELSDGQPLFPGESEIDQLFTIQKVLGPLPSEQMKLFYSNPRFHGLRFPAVNHP
QSLERRYLGILNSVLLDLMKNLLKLDPADRYLTEQCLNHPTFQTQRLLDRSPSRSAKRKPYHV
ESSTLSNRNQAGKSTALQSHHRSNSKDIQQLSVGLPRADEGLPA [symbol] ESFLNGNLAGASLSPLHT
KTYQASSQPGSTSKDLTNNNIPHLLSPKEAKSKTEFDFNIDPKPSEGPGTKYLKSNSRSQQNR
HSFMESSQSKAGTLQPNEKQSRHSYIDTIPQSSRSPSYRTKAKSHGALSDSKSVSQLSEARAQ
IAEPSTSRYFPSSCLDLNSPTSPTPTRHSDTRTLLSPSGRNNRNEGTLDSRRTTTRHSKTMEE
LKLPEHMDSSHSHSLSAPHESFSYGLGYTSPFSSQQRPHRHSMYVTRDKVRAKGLDGSLSIGQ
GMAARANSLQLLSPQPGEQLPPEMTVARSSVKETSREGTSSFHTRQKSEGGVYHDPHSDDGTA
PKENRHLYNDPVPRRVGSFYRVPSPRPDNSFHEN [symbol] VSTRVSSLPSESSSGT [symbol] HSKRQPAFDPW
KSPEQISHSEQLKEKEKQGFFRSMKKKKKKSQTVPNSDSPDLLTLQKSIHSASTPSSRPKEWR
PEKISDLQTQSQPLKSLRKLLHLSSASNHPASSDPRFQPLTAQQTKNSFSEIRIHPLSQASGG
SSNIRQEPAPKGRPALQLPGQMDPGWHVSSVTRSATEGPSYSEQLGAKSGPNGHPYQRTQRSR

[chemical structure]

MBip-TATκ28-CDKL5_l07-FH_cho[1-7,9-10NQ]
SEQ ID NO: 103
MKLSLVAAMLLLLSLVAAMLLLLSAARAGDAAQPARRARRTKLAAYARKAARQARAGGGGSKI
PNIGNVMNKFEILGVVGEGAYGVVLKCRHKETHEIVAIKKFKDSEENEEVKETTLRELKMLRT
LKQENIVELKEAFRRRGKLYLVFEYVEKNMLELLEEMPNGVPPEKVKSYIYQLIKAIHWCHKN
DIVHRDIKPENLLISHNDVLKLCDFGFARQLSEGNNAQYTEYVATRWYRSPELLLGAPYGKSV
DMWSVGCILGELSDGQPLFPGESEIDQLFTIQKVLGPLPSEQMKLFYSNPRFHGLRFPAVNHP
QSLERRYLGILNSVLLDLMKNLLKLDPADRYLTEQCLNHPTFQTQRLLDRSPSRSAKRKPYHV
ESSTLSNRNQAGKSTALQSHHRSNSKDIQQLSVGLPRADEGLPA [symbol] ESFLNGNLAGASLSPLHT
KTYQASSQPGSTSKDLTNNNIPHLLSPKEAKSKTEFDFNIDPKPSEGPGTKYLKSNSRSQQNR
HSFMESSQSKAGTLQPNEKQSRHSYIDTIPQSSRSPSYRTKAKSHGALSDSKSVSQLSEARAQ
IAEPSTSRYFPSSCLDLNSPTSPTPTRHSDTRTLLSPSGRNNRNEGTLDSRRTTTRHSKTMEE
LKLPEHMDSSHSHSLSAPHESFSYGLGYTSPFSSQQRPHRHSMYVTRDKVRAKGLDGSLSIGQ
GMAARANSLQLLSPQPGEQLPPEMTVARSSVKETSREGTSSFHTRQKSEGGVYHDPHSDDGTA
PKENRHLYNDPVPRRVGSFYRVPSPRPDNSFHEN [symbol] VSTRVSSLPSESSSGT [symbol] HSKRQPAFDPW
KSPEQISHSEQLKEKEKQGFFRSMKKKKKKSQTVPNSDSPDLLTLQKSIHSASTPSSRPKEWR
PEKISDLQTQSQPLKSLRKLLHLSSASNHPASSDPRFQPLTAQQTKNSFSEIRIHPLSQASGG
SSNIRQEPAPKGRPALQLPGQMDPGWHVSSVTRSATEGPSYSEQLGAKSGPNGHPYQRTQRSR

[chemical structure]

MBip-TATκ28-CDKL5_l07-FH_cho[1-8,10NQ]
SEQ ID NO: 104
MKLSLVAAMLLLLSLVAAMLLLLSAARAGDAAQPARRARRTKLAAYARKAARQARAGGGGSKI
PNIGNVMNKFEILGVVGEGAYGVVLKCRHKETHEIVAIKKFKDSEENEEVKETTLRELKMLRT
LKQENIVELKEAFRRRGKLYLVFEYVEKNMLELLEEMPNGVPPEKVKSYIYQLIKAIHWCHKN
DIVHRDIKPENLLISHNDVLKLCDFGFARQLSEGNNAQYTEYVATRWYRSPELLLGAPYGKSV
DMWSVGCILGELSDGQPLFPGESEIDQLFTIQKVLGPLPSEQMKLFYSNPRFHGLRFPAVNHP
QSLERRYLGILNSVLLDLMKNLLKLDPADRYLTEQCLNHPTFQTQRLLDRSPSRSAKRKPYHV
ESSTLSNRNQAGKSTALQSHHRSNSKDIQQLSVGLPRADEGLPA [symbol] ESFLNGNLAGASLSPLHT
KTYQASSQPGSTSKDLTNNNIPHLLSPKEAKSKTEFDFNIDPKPSEGPGTKYLKSNSRSQQNR
HSFMESSQSKAGTLQPNEKQSRHSYIDTIPQSSRSPSYRTKAKSHGALSDSKSVSQLSEARAQ
IAEPSTSRYFPSSCLDLNSPTSPTPTRHSDTRTLLSPSGRNNRNEGTLDSRRTTTRHSKTMEE
LKLPEHMDSSHSHSLSAPHESFSYGLGYTSPFSSQQRPHRHSMYVTRDKVRAKGLDGSLSIGQ
GMAARANSLQLLSPQPGEQLPPEMTVARSSVKETSREGTSSFHTRQKSEGGVYHDPHSDDGTA
PKENRHLYNDPVPRRVGSFYRVPSPRPDNSFHEN [symbol] VSTRVSSLPSESSSGT [symbol] HSKRQPAFDPW
KSPEQISHSEQLKEKEKQGFFRSMKKKKKKSQTVPNSDSPDLLTLQKSIHSASTPSSRPKEWR
PEKISDLQTQSQPLKSLRKLLHLSSASNHPASSDPRFQPLTAQQTKNSFSEIRIHPLSQASGG
SSNIRQEPAPKGRPALQLPGQMDPGWHVSSVTRSATEGPSYSEQLGAKSGPNGHPYQRTQRSR

[chemical structure]

MBip-TATκ28-CDKL5_107-FH_cho[1-9NQ]
SEQ ID NO: 105
MKLSLVAAMLLLLSLVAAMLLLLSAARAGDAAQPARRARRTKLAAYARKAARQARAGGGGSKI
PNIGNVMNKFEILGVVGEGAYGVVLKCRHKETHEIVAIKKFKDSEENEEVKETTLRELKMLRT
LKQENIVELKEAFRRRGKLYLVFEYVEKNMLELLEEMPNGVPPEKVKSYIYQLIKAIHWCHKN
DIVHRDIKPENLLISHNDVLKLCDFGFARQLSEGNNAQYTEYVATRWYRSPELLLGAPYGKSV
DMWSVGCILGELSDGQPLFPGESEIDQLFTIQKVLGPLPSEQMKLFYSNPRFHGLRFPAVNHP
QSLERRYLGILNSVLLDLMKNLLKLDPADRYLTEQCLNHPTFQTQRLLDRSPSRSAKRKPYHV
ESSTLSNRNQAGKSTALQSHHRSNSKDIQQLSVGLPRADEGLPA [symbol] ESFLNGNLAGASLSPLHT
KTYQASSQPGSTSKDLTNNNIPHLLSPKEAKSKTEFDFNIDPKPSEGPGTKYLKSNSRSQQNR
HSFMESSQSKAGTLQPNEKQSRHSYIDTIPQSSRSPSYRTKAKSHGALSDSKSVSQLSEARAQ
IAEPSTSRYFPSSCLDLNSPTSPTPTRHSDTRTLLSPSGRNNRNEGTLDSRRTTTRHSKTMEE
LKLPEHMDSSHSHSLSAPHESFSYGLGYTSPFSSQQRPHRHSMYVTRDKVRAKGLDGSLSIGQ
GMAARANSLQLLSPQPGEQLPPEMTVARSSVKETSREGTSSFHTRQKSEGGVYHDPHSDDGTA
PKENRHLYNDPVPRRVGSFYRVPSPRPDNSFHEN [symbol] VSTRVSSLPSESSSGT [symbol] HSKRQPAFDPW
KSPEQISHSEQLKEKEKQGFFRSMKKKKKKSQTVPNSDSPDLLTLQKSIHSASTPSSRPKEWR
PEKISDLQTQSQPLKSLRKLLHLSSASNHPASSDPRFQPLTAQQTKNSFSEIRIHPLSQASGG
SSNIRQEPAPKGRPALQLPGQMDPGWHVSSVTRSATEGPSYSEQLGAKSGPNGHPYQRTQRSR

[chemical structure]

AAVC-CBh-hCDKL5-107
L-ITR: 1-141
CBh promoter: 159-976
hCDKL5-107 ORF: 1000-2885
bGHp(A): 3910-4137
R-ITR: 4149-4289
Amp(R): 5206-6063
pUC origin: 6214-6881
SEQ ID NO: 106
      1 CCTGCAGGCA GCTGCGCGCT CGCTCGCTCA CTGAGGCCGC CCGGGCAAAG
    51 CCCGGGCGTC GGGCGACCTT TGGTCGCCCG GCCTCAGTGA GCGAGCGAGC
  101 GCGCAGAGAG GGAGTGGCCA ACTCCATCAC TAGGGGTTCC TGCGGCCTAA
  151 GGCAATTGTT AATAGTAATC AATTACGGGG TCATTAGTTC ATAGGCCATA
  201 TATGGAGTTC CGCGTTACAT AACTTACGGT AAATGGCCCG CCTGGCTGAC
  251 CGCCCAACGA CCCCCGCCCA TTGACGTCAA TAATGACGTA TGTTCCCATA
  301 GTAACGCCAA TAGGGACTTT CCATTGACGT CAATGGGTGG AGTATTTACG
  351 GTAAACTGCC CACTTGGCAG TACATCAAGT GTATCATATG CCAAGTACGC
  401 CCCCTATTGA CGTCAATGAC GGTAAATGGC CCGCCTGGCA TTATGCCCAG
  451 TACATGACCT TACGGGACTT TCCTACTTGG CAGTACATCT CCACGTTCTG
  501 CTTCAGTCTC CCCATCTCCC CCCCCTCCCC ACCCCCAATT TTGTATTTAT
  551 TTATTTTTTA ATTATTTTGT GCAGCGATGG GGGCGGGGGG GGGGGGGGCG
  601 CGCGCCAGGC GGGGCGGGGC GGGGCGAGGG GCGGGGCGGG GCGAGGCGGA
  651 GAGGTGCGGC GGCAGCCAAT CAGAGCGGCG CGCTCCGAAA GTTTCCTTTT
  701 ATGGCGAGGC GGCGGCGGCG GCGGCCCTAT AAAAAGCGAA GCGCGCGGCG
  751 GGGAGTCGCT GCGTTGCCTT CGCCCCGTGC CCCGCTCCGC GCCGCCTCGC
  801 GCCGCCCGCC CCGGCTCTGA CTGACCGCGT TACTCCCACA GGTGAGCGGG
  851 CGGGACGGCC CTTCTCCTCC GGGCTGTAAT TAGCAAGAGG TAAGGGTTTA
  901 AGGGATGGTT GGTTGGTGGG GTATTAATGT TTAATTACCT GTTTTACAGG
  951 CCTGAAATCA CTTGGTTTTA GGTTGGGCTA GCCAAAGCTT GCCGCCACCA
1001 TGAAAATCCC TAACATTGGT AACGTGATGA ACAAGTTTGA AATCCTCGGG
1051 GTCGTCGGAG AAGGTGCCTA CGGGGTCGTG CTGAAGTGCA GACACAAGGA
1101 GACACACGAG ATCGTGGCCA TCAAGAAGTT CAAGGATAGC GAGGAGAACG
1151 AGGAGGTGAA GGAGACAACC CTGAGAGAGC TGAAGATGCT GCGGACACTG
1201 AAGCAGGAGA ACATCGTGGA GCTGAAGGAG GCTTTCAGGA GACGGGGAAA
1251 GCTGTACCTG GTGTTTGAGT ACGTGGAGAA GAACATGCTG GAGCTGCTGG
1301 AGGAGATGCC TAACGGCGTG CCCCCTGAGA AGGTGAAGTC CTACATCTAC
1351 CAGCTGATCA AGGCCATCCA CTGGTGCCAC AAGAACGACA TCGTGCACAG
1401 AGATATCAAG CCAGAGAACC TGCTGATCTC CCACAACGAC GTGCTGAAGC
1451 TGTGCGATTT CGGCTTTGCC CGGAACCTGA GCGAGGGAAA CAACGCCAAC
1501 TACACAGAGT ACGTGGCTAC CAGATGGTAC CGGAGCCCAG AGCTGCTGCT
1551 GGGAGCTCCA TACGGAAAGA GCGTGGACAT GTGGTCCGTG GGCTGCATCC
1601 TGGGAGAGCT GTCTGACGGC CAGCCTCTGT TCCCAGGAGA GAGCGAGATC
1651 GATCAGCTGT TTACCATCCA GAAGGTGCTG GGCCCTCTGC CAAGCGAGCA
1701 GATGAAGCTG TTCTACTCCA ACCCTAGATT CCACGGACTG CGGTTTCCCG
1751 CCGTGAACCA CCCTCAGAGC CTGGAGCGCA GGTACCTGGG CATCCTGAAC
1801 TCCGTGCTGC TGGATCTGAT GAAGAACCTG CTGAAGCTGG ACCCCGCCGA
1851 TAGATACCTG ACCGAGCAGT GTCTGAACCA CCCTACATTT CAGACCCAGC
1901 GCCTGCTGGA CAGGAGCCCT TCCAGATCTG CTAAGCGGAA GCCATACCAC
1951 GTGGAGAGCT CCACCCTGTC CAACAGAAAC CAGGCCGGCA AGTCTACAGC
2001 TCTGCAGAGC CACCACCGGA GCAACTCCAA GGACATCCAG AACCTGTCTG
2051 TGGGCCTGCC TAGGGCTGAT GAGGGACTGC CAGCTAACGA GAGCTTCCTG
2101 AACGGCAACC TGGCCGGAGC TTCTCTGAGC CCACTGCACA CAAAGACCTA
2151 CCAGGCCTCT AGCCAGCCCG GCTCCACATC TAAGGACCTG ACCAACAACA
2201 ACATCCCACA CCTGCTGTCT CCCAAGGAGG CTAAGAGCAA GACCGAGTTC
2251 GACTTTAACA TCGATCCCAA GCCTAGCGAG GGCCCAGGAA CAAAGTACCT
2301 GAAGAGCAAC TCCCGCTCTC AGCAGAACAG GCACTCCTTC ATGGAGTCCT
2351 CTCAGTCTAA GGCCGGCACC CTGCAGCCCA ACGAGAAGCA GAGCAGGCAC
2401 TCCTACATCG ATACCATCCC CCAGAGCTCC AGAAGCCCTT CCTACCGGAC
2451 AAAGGCCAAG AGCCACGGCG CTCTGTCTGA CAGCAAGTCC GTGTCTAACC
2501 TGTCCGAGGC TAGGGCTCAG ATCGCTGAGC CAAGCACCTC CAGGTACTTT
2551 CCTTCTAGCT GTCTGGACCT GAACTCTCCT ACAAGCCCAA CACCCACCCG
2601 CCACTCCGAT ACAAGGACCC TGCTGTCTCC AAGCGGCAGG AACAACAGGA
2651 AGGAGGGAAC CCTGGATTCT AGACGGACCA CAACCCGCCA CAGCAAGACA
2701 ATGGAGGAGC TGAAGCTGCC AGAGCACATG GACTCCTCTC ACTCCCACTC
2751 TCTGAGCGCC CCCCACGAGT CCTTCTCTTA CGGCCTGGGA TACACCTCCC
2801 CCTTCAGGTC CCAGCAGAGG CCCCACAGGC ACTCTATGTA CGTGACACGC
2851 GACAAGGTGA GGGCCAAGGG CCTGGATGGA AGCCTGTCCA TCGGACAGGG
2901 AATGGCTGCT AGGGCTAACT CCCTGCAGCT GCTGTCTCCT CAGCCAGGAG
2951 AGCAGCTGCC ACCAGAGATG ACCGTGGCTC GCTCTAGCGT GAAGGAGACA
3001 AGCAGGGAGG GCACCTCCTC TTTCCACACA CGCCAGAAGT CCGAGGGCGG
3051 AGTGTACCAC GACCCCCACT CTGACGATGG AACAGCTCCT AAGGAGAACA
3101 GGCACCTGTA CAACGATCCC GTGCCTCGCA GGGTGGGCTC CTTCTACAGA
3151 GTGCCATCTC CCCGGCCTGA CAACAGCTTT CACGAGAACA ACGTGTCCAC
3201 CCGCGTGAGC TCCCTGCCTT CTGAGTCTAG CTCCGGAACA AACCACTCTA
3251 AGAGGCAGCC CGCCTTTGAC CCTTGGAAGA GCCCAGAGAA CATCTCTCAC
3301 AGCGAGCAGC TGAAGGAGAA GGAGAAGCAG GGCTTCTTTC GCAGCATGAA
3351 GAAGAAGAAG AAGAAGAGCC AGACCGTGCC TAACTCCGAC TCTCCAGATC
3401 TGCTGACCCT GCAGAAGTCC ATCCACAGCG CCTCCACACC ATCTAGCCGC
3451 CCTAAGGAGT GGAGGCCTGA GAAGATCAGC GATCTGCAGA CACAGAGCCA
3501 GCCACTGAAG TCCCTGAGGA AGCTGCTGCA CCTGTCCTCT GCCAGCAACC
3551 ACCCCGCTAG CTCCGACCCA AGATTCCAGC CCCTGACAGC CCAGCAGACC
3601 AAGAACTCTT TTAGCGAGAT CCGGATCCAC CCTCTGTCCC AGGCTTCTGG
3651 CGGATCTAGC AACATCAGAC AGGAGCCAGC TCCAAAGGGC CGGCCCGCTC
3701 TGCAGCTGCC TGGCCAGATG GACCCAGGAT GGCACGTGTC CTCTGTGACA
3751 AGATCCGCCA CCGAGGGACC ATCCTACTCT GAGCAGCTGG GCGCTAAGTC
3801 TGGCCCTAAC GGACACCCAT ACAATAGGAC TAATAGAAGC AGAATGCCAA
3851 ACCTCAATGA CCTCAAGGAA ACAGCACTCT GATAAGCGGC CGCAACTCGA
3901 GACTCTAGAC GACTGTGCCT TCTAGTTGCC AGCCATCTGT TGTTTGCCCC
3951 TCCCCCGTGC CTTCCTTGAC CCTGGAAGGT GCCACTCCCA CTGTCCTTTC
4001 CTAATAAAAT GAGGAAATTG CATCGCATTG TCTGAGTAGG TGTCATTCTA
4051 TTCTGGGGGG TGGGGTGGGG CAGGACAGCA AGGGGGAGGA TTGGGAAGAC
4101 AATAGCAGGC ATGCTGGGGA TGCGGTGGGC TCTATGGCCG CGGGCCGCAG
4151 GAACCCCTAG TGATGGAGTT GGCCACTCCC TCTCTGCGCG CTCGCTCGCT
4201 CACTGAGGCC GGGCGACCAA AGGTCGCCCG ACGCCCGGGC TTTGCCCGGG
4251 CGGCCTCAGT GAGCGAGCGA GCGCGCAGCT GCCTGCAGGG GCGCCTGATG
4301 CGGTATTTTC TCCTTACGCA TCTGTGCGGT ATTTCACACC GCATACGTCA
4351 AAGCAACCAT AGTACGCGCC CTGTAGCGGC GCATTAAGCG CGGCGGGTGT
4401 GGTGGTTACG CGCAGCGTGA CCGCTACACT TGCCAGCGCC CTAGCGCCCG
4451 CTCCTTTCGC TTTCTTCCCT TCCTTTCTCG CCACGTTCGC CGGCTTTCCC
4501 CGTCAAGCTC TAAATCGGGG GCTCCCTTTA GGGTTCCGAT TTAGTGCTTT
4551 ACGGCACCTC GACCCCAAAA AACTTGATTT GGGTGATGGT TCACGTAGTG
4601 GGCCATCGCC CTGATAGACG GTTTTTCGCC CTTTGACGTT GGAGTCCACG
4651 TTCTTTAATA GTGGACTCTT GTTCCAAACT GGAACAACAC TCAACCCTAT
4701 CTCGGGCTAT TCTTTTGATT TATAAGGGAT TTTGCCGATT TCGGCCTATT
4751 GGTTAAAAAA TGAGCTGATT TAACAAAAAT TTAACGCGAA TTTTAACAAA
4801 ATATTAACGT TTACAATTTT ATGGTGCACT CTCAGTACAA TCTGCTCTGA
4851 TGCCGCATAG TTAAGCCAGC CCCGACACCC GCCAACACCC GCTGACGCGC
4901 CCTGACGGGC TTGTCTGCTC CCGGCATCCG CTTACAGACA AGCTGTGACC
4951 GTCTCCGGGA GCTGCATGTG TCAGAGGTTT TCACCGTCAT CACCGAAACG
5001 CGCGAGACGA AAGGGCCTCG TGATACGCCT ATTTTTATAG GTTAATGTCA
5051 TGATAATAAT GGTTTCTTAG ACGTCAGGTG GCACTTTTCG GGGAAATGTG
5101 CGCGGAACCC CTATTTGTTT ATTTTTCTAA ATACATTCAA ATATGTATCC
5151 GCTCATGAGA CAATAACCCT GATAAATGCT TCAATAATAT TGAAAAAGGA
5201 AGAGTATGAG TATTCAACAT TTCCGTGTCG CCCTTATTCC CTTTTTTGCG
5251 GCATTTTGCC TTCCTGTTTT TGCTCACCCA GAAACGCTGG TGAAAGTAAA
5301 AGATGCTGAA GATCAGTTGG GTGCACGAGT GGGTTACATC GAACTGGATC
5351 TCAACAGCGG TAAGATCCTT GAGAGTTTTC GCCCCGAAGA ACGTTTTCCA
5401 ATGATGAGCA CTTTTAAAGT TCTGCTATGT GGCGCGGTAT TATCCCGTAT
5451 TGACGCCGGG CAAGAGCAAC TCGGTCGCCG CATACACTAT TCTCAGAATG
5501 ACTTGGTTGA GTACTCACCA GTCACAGAAA AGCATCTTAC GGATGGCATG
5551 ACAGTAAGAG AATTATGCAG TGCTGCCATA ACCATGAGTG ATAACACTGC
5601 GGCCAACTTA CTTCTGACAA CGATCGGAGG ACCGAAGGAG CTAACCGCTT
5651 TTTTGCACAA CATGGGGGAT CATGTAACTC GCCTTGATCG TTGGGAACCG
5701 GAGCTGAATG AAGCCATACC AAACGACGAG CGTGACACCA CGATGCCTGT
5751 AGCAATGGCA ACAACGTTGC GCAAACTATT AACTGGCGAA CTACTTACTC
5801 TAGCTTCCCG GCAACAATTA ATAGACTGGA TGGAGGCGGA TAAAGTTGCA
5851 GGACCACTTC TGCGCTCGGC CCTTCCGGCT GGCTGGTTTA TTGCTGATAA
5901 ATCTGGAGCC GGTGAGCGTG GGTCTCGCGG TATCATTGCA GCACTGGGGC
5951 CAGATGGTAA GCCCTCCCGT ATCGTAGTTA TCTACACGAC GGGGAGTCAG
6001 GCAACTATGG ATGAACGAAA TAGACAGATC GCTGAGATAG GTGCCTCACT
6051 GATTAAGCAT TGGTAACTGT CAGACCAAGT TTACTCATAT ATACTTTAGA
6101 TTGATTTAAA ACTTCATTTT TAATTTAAAA GGATCTAGGT GAAGATCCTT
6151 TTTGATAATC TCATGACCAA AATCCCTTAA CGTGAGTTTT CGTTCCACTG
6201 AGCGTCAGAC CCCGTAGAAA AGATCAAAGG ATCTTCTTGA GATCCTTTTT
6251 TTCTGCGCGT AATCTGCTGC TTGCAAACAA AAAAACCACC GCTACCAGCG
6301 GTGGTTTGTT TGCCGGATCA AGAGCTACCA ACTCTTTTTC CGAAGGTAAC
6351 TGGCTTCAGC AGAGCGCAGA TACCAAATAC TGTCCTTCTA GTGTAGCCGT
6401 AGTTAGGCCA CCACTTCAAG AACTCTGTAG CACCGCCTAC ATACCTCGCT
6451 CTGCTAATCC TGTTACCAGT GGCTGCTGCC AGTGGCGATA AGTCGTGTCT
6501 TACCGGGTTG GACTCAAGAC GATAGTTACC GGATAAGGCG CAGCGGTCGG
6551 GCTGAACGGG GGGTTCGTGC ACACAGCCCA GCTTGGAGCG AACGACCTAC
6601 ACCGAACTGA GATACCTACA GCGTGAGCTA TGAGAAAGCG CCACGCTTCC
6651 CGAAGGGAGA AAGGCGGACA GGTATCCGGT AAGCGGCAGG GTCGGAACAG
6701 GAGAGCGCAC GAGGGAGCTT CCAGGGGGAA ACGCCTGGTA TCTTTATAGT
6751 CCTGTCGGGT TTCGCCACCT CTGACTTGAG CGTCGATTTT TGTGATGCTC
6801 GTCAGGGGGG CGGAGCCTAT GGAAAAACGC CAGCAACGCG GCCTTTTTAC
6851 GGTTCCTGGC CTTTTGCTGG CCTTTTGCTC ACATGT
L-ITR: 1-141
CBh promoter: 159-976
hCDKL5-107 (dead Kinase) ORF: 1000-2885
bGHp(A): 3910-4137
R-ITR: 4149-4289
Amp(R): 5206-6063
pUC origin: 6214-6881
SEQ ID NO: 107
      1 CCTGCAGGCA GCTGCGCGCT CGCTCGCTCA CTGAGGCCGC CCGGGCAAAG
    51 CCCGGGCGTC GGGCGACCTT TGGTCGCCCG GCCTCAGTGA GCGAGCGAGC
  101 GCGCAGAGAG GGAGTGGCCA ACTCCATCAC TAGGGGTTCC TGCGGCCTAA
  151 GGCAATTGTT AATAGTAATC AATTACGGGG TCATTAGTTC ATAGCCCATA
  201 TATGGAGTTC CGCGTTACAT AACTTACGGT AAATGGCCCG CCTGGCTGAC
  251 CGCCCAACGA CCCCCGCCCA TTGACGTCAA TAATGACGTA TGTTCCCATA
  301 GTAACGCCAA TAGGGACTTT CCATTGACGT CAATGGGTGG AGTATTTACG
  351 GTAAACTGCC CACTTGGCAG TACATCAAGT GTATCATATG CCAAGTACGC
  401 CCCCTATTGA CGTCAATGAC GGTAAATGGC CCGCCTGGCA TTATGCCCAG
  451 TACATGACCT TACGGGACTT TCCTACTTGG CAGTACATCT CCACGTTCTG
  501 CTTCAGTCTC CCCATCTCCC CCCCCTCCCC ACCCCCAATT TTGTATTTAT
  551 TTATTTTTTA ATTATTTTGT GCAGCGATGG GGGCGGGGGG GGGGGGGGCG
  601 CGCGCCAGGC GGGGCGGGGC GGGGCGAGGG GCGGGGCGGG GCGAGGCGGA
  651 GAGGTGCGGC GGCAGCCAAT CAGAGCGGCG CGCTCCGAAA GTTTCCTTTT
  701 ATGGCGAGGC GGCGGCGGCG GCGGCCCTAT AAAAAGCGAA GCGCGCGGCG
  751 GGGAGTCGCT GCGTTGCCTT CGCCCCGTGC CCCGCTCCGC GCCGCCTCGC
  801 GCCGCCCGCC CCGGCTCTGA CTGACCGCGT TACTCCCACA GGTGAGCGGG
  851 CGGGACGGCC CTTCTCCTCC GGGCTGTAAT TAGCAAGAGG TAAGGGTTTA
  901 AGGGATGGTT GGTTGGTGGG GTATTAATGT TTAATTACCT GTTTTACAGG
  951 CCTGAAATCA CTTGGTTTTA GGTTGGGCTA GCCAAAGCTT GCCGCCACCA
1001 TGAAAATCCC TAATATCGGA AATGTGATGA ATAAGTTTGA AATCCTCGGG
1051 GTCGTCGGAG AAGGTGCCTA CGGGGTCGTC CTGAAATGCA GACACAAGGA
1101 GACACACGAG ATCGTGGCCA TCAGGAGATT CAAGGATAGC GAGGAGAACG
1151 AGGAGGTGAA GGAGACAACC CTGCGCGAGC TGAAGATGCT GAGGACACTG
1201 AAGCAGGAGA ACATCGTGGA GCTGAAGGAG GCTTTCCGGC GCAGGGGAAA
1251 GCTGTACCTG GTGTTTGAGT ACGTGGAGAA GAACATGCTG GAGCTGCTGG
1301 AGGAGATGCC TAACGGCGTG CCCCCTGAGA AGGTGAAGTC CTACATCTAC
1351 CAGCTGATCA AGGCCATCCA CTGGTGCCAC AAGAACGACA TCGTGCACCG
1401 CGATATCAAG CCAGAGAACC TGCTGATCTC CCACAACGAC GTGCTGAAGC
1451 TGTGCGATTT CGGCTTTGCC AGGAACCTGA GCGAGGGAAA CAACGCCAAC
1501 TACACAGAGT ACGTGGCTAC CCGCTGGTAC AGGAGCCCAG AGCTGCTGCT
1551 GGGAGCTCCA TACGGAAAGA GCGTGGACAT GTGGTCCGTG GGCTGCATCC
1601 TGGGAGAGCT GTCTGACGGC CAGCCTCTGT TCCCAGGAGA GAGCGAGATC
1651 GATCAGCTGT TTACCATCCA GAAGGTGCTG GGCCCTCTGC CAAGCGAGCA
1701 GATGAAGCTG TTCTACTCCA ACCCTCGCTT CCACGGACTG AGGTTTCCCG
1751 CCGTGAACCA CCCTCAGAGC CTGGAGAGAC GGTACCTGGG CATCCTGAAC
1801 TCCGTGCTGC TGGATCTGAT GAAGAACCTG CTGAAGCTGG ACCCCGCCGA
1851 TCGCTACCTG ACCGAGCAGT GTCTGAACCA CCCTACATTT CAGACCCAGA
1901 GACTGCTGGA CCGGAGCCCT TCCCGCTCTG CTAAGAGGAA GCCATACCAC
1951 GTGGAGAGCT CCACCCTGTC CAACCGCAAC CAGGCCGGCA AGTCTACAGC
2001 TCTGCAGAGC CACCACAGGA GCAACTCCAA GGACATCCAG AACCTGTCTG
2051 TGGGCCTGCC TAGGGCTGAT GAGGGACTGC CAGCTAACGA GAGCTTCCTG
2101 AACGGCAACC TGGCCGGAGC TTCTCTGAGC CCACTGCACA CAAAGACCTA
2151 CCAGGCCTCT AGCCAGCCCG GCTCCACATC TAAGGACCTG ACCAACAACA
2201 ACATCCCACA CCTGCTGTCT CCCAAGGAGG CTAAGAGGAA GACCGAGTTC
2251 GACTTTAACA TCGATCCCAA GCCTAGCGAG GGCCCAGGAA CAAAGTACCT
2301 GAAGAGCAAC TCCAGATCTC AGCAGAACCG GCACTCCTTC ATGGAGTCCT
2351 CTCAGTCTAA GGCCGGCACC CTGCAGCCCA ACGAGAAGCA GAGCAGGCAC
2401 TCCTACATCG ATACCATCCC CCAGAGCTCC CGCAGCCCTT CCTACAGGAC
2451 AAAGGCCAAG AGCCACGGCG CTCTGTCTGA CAGCAAGTCC GTGTCTAACC
2501 TGTCCGAGGC CAGAGCTCAG ATCGCTGAGC CCAGCACCTC CCGGTACTTT
2551 CCTTCTAGCT GTCTGGACCT GAACTCTCCT ACAAGCCCAA CACCCACCAG
2601 ACACTCCGAT ACACGGACCC TGCTGTCTCC AAGCGGCAGA AACAACCGGA
2651 AGGAGGGAAC CCTGGATTCT CGCAGGACCA CAACCAGACA CAGCAAGACA
2701 ATGGAGGAGC TGAAGCTGCC AGAGCACATG GACTCCTCTC ACTCCCACTC
2751 TCTGAGCGCC CCCCACGAGT CCTTCTCTTA CGGCCTGGGA TACACCTCCC
2801 CCTTCAGCTC CCAGCAGCGC CCCCACAGGC ACTCTATGTA CGTGACAAGA
2851 GACAAGGTGC GGGCCAAGGG CCTGGATGGA AGCCTGTCCA TCGGCCAGGG
2901 AATGGCCGCT AGGGCTAACT CCCTGCAGCT GCTGTCTCCT CAGCCAGGAG
2951 AGCAGCTGCC ACCCGAGATG ACCGTGGCCA GATCTAGCGT GAAGGAGACA
3001 AGCCGGGAGG GCACCTCCTC TTTCCACACA AGACAGAAGT CCGAGGGCGG
3051 AGTGTACCAC GACCCCCACT CTGACGATGG AACAGCTCCT AAGGAGAACC
3101 GGCACCTGTA CAACGATCCC GTGCCTAGAC GGGTGGGCTC CTTCTACCGC
3151 GTGCCATCTC CCAGGCCTGA CAACAGCTTT CACGAGAACA ACGTGTCCAC
3201 CAGAGTGAGC TCCCTGCCTT CTGAGTCTAG CTCCGGAACA AACCACTCTA
3251 AGCGGCAGCC CGCCTTTGAC CCTTGGAAGA GCCCAGAGAA CATCTCTCAC
3301 AGCGAGCAGC TGAAGGAGAA GGAGAAGCAG GGCTTCTTTA GAAGCATGAA
3351 GAAGAAGAAG AAGAAGAGCC AGACCGTGCC TAACTCCGAC TCTCCAGATC
3401 TGCTGACCCT GCAGAAGTCC ATCCACAGCG CCTCCACACC CTCTAGCAGA
3451 CCTAAGGAGT GGCGGCCTGA GAAGATCAGC GATCTGCAGA CACAGAGCCA
3501 GCCACTGAAG TCCCTGCGGA AGCTGCTGCA CCTGTCCTCT GCCAGCAACC
3551 ACCCAGCTAG CTCCGACCCA AGGTTCCAGC CACTGACAGC TCAGCAGACC
3601 AAGAACTCTT TTAGCGAGAT CAGGATCCAC CCTCTGTCCC AGGCTTCTGG
3651 CGGATCTAGC AACATCAGGC AGGAGCCAGC TCCAAAGGGC AGGCCCGCTC
3701 TGCAGCTGCC TGGACAGATG GACCCAGGAT GGCACGTGTC CTCTGTGACA
3751 AGATCCGCCA CCGAGGGACC ATCCTACTCT GAGCAGCTGG GCGCTAAGTC
3801 TGGCCCTAAC GGACACCCAT ACAACAGAAC AAACAGAAGC AGAATGCCCA
3851 ACCTCAATGA CCTCAAAGAA ACAGCACTCT GATAAGCGGC CGCAACTCGA
3901 GACTCTAGAC GACTGTGCCT TCTAGTTGCC AGCCATCTGT TGTTTGCCCC
3951 TCCCCCGTGC CTTCCTTGAC CCTGGAAGGT GCCACTCCCA CTGTCCTTTC
4001 CTAATAAAAT GAGGAAATTG CATCGCATTG TCTGAGTAGG TGTCATTCTA
4051 TTCTGGGGGG TGGGGTGGGG CAGGACAGCA AGGGGGAGGA TTGGGAAGAC
4101 AATAGCAGGC ATGCTGGGGA TGCGGTGGGC TCTATGGCCG CGGGCCGCAG
4151 GAACCCCTAG TGATGGAGTT GGCCACTCCC TCTCTGCGCG CTCGCTCGCT
4201 CACTGAGGCC GGGCGACCAA AGGTCGCCCG ACGCCCGGGC TTTGCCCGGG
4251 CGGCCTCAGT GAGCGAGCGA GCGCGCAGCT GCCTGCAGGG GCGCCTGATG
4301 CGGTATTTTC TCCTTACGCA TCTGTGCGGT ATTTCACACC GCATACGTCA
4351 AAGCAACCAT AGTACGCGCC CTGTAGCGGC GCATTAAGCG CGGCGGGTGT
4401 GGTGGTTACG CGCAGCGTGA CCGCTACACT TGCCAGCGCC CTAGCGCCCG
4451 CTCCTTTCGC TTTCTTCCCT TCCTTTCTCG CCACGTTCGC CGGCTTTCCC
4501 CGTCAAGCTC TAAATCGGGG GCTCCCTTTA GGGTTCCGAT TTAGTGCTTT
4551 ACGGCACCTC GACCCCAAAA AACTTGATTT GGGTGATGGT TCACGTAGTG
4601 GGCCATCGCC CTGATAGACG GTTTTTCGCC CTTTGACGTT GGAGTCCACG
4651 TTCTTTAATA GTGGACTCTT GTTCCAAACT GGAACAACAC TCAACCCTAT
4701 CTCGGGCTAT TCTTTTGATT TATAAGGGAT TTTGCCGATT TCGGCCTATT
4751 GGTTAAAAAA TGAGCTGATT TAACAAAAAT TTAACGCGAA TTTTAACAAA
4801 ATATTAACGT TTACAATTTT ATGGTGCACT CTCAGTACAA TCTGCTCTGA
4851 TGCCGCATAG TTAAGCCAGC CCCGACACCC GCCAACACCC GCTGACGCGC
4901 CCTGACGGGC TTGTCTGCTC CCGGCATCCG CTTACAGACA AGCTGTGACC
4951 GTCTCCGGGA GCTGCATGTG TCAGAGGTTT TCACCGTCAT CACCGAAACG
5001 CGCGAGACGA AAGGGCCTCG TGATACGCCT ATTTTTATAG GTTAATGTCA
5051 TGATAATAAT GGTTTCTTAG ACGTCAGGTG GCACTTTTCG GGGAAATGTG
5101 CGCGGAACCC CTATTTGTTT ATTTTTCTAA ATACATTCAA ATATGTATCC
5151 GCTCATGAGA CAATAACCCT GATAAATGCT TCAATAATAT TGAAAAAGGA
5201 AGAGTATGAG TATTCAACAT TTCCGTGTCG CCCTTATTCC CTTTTTTGCG
5251 GCATTTTGCC TTCCTGTTTT TGCTCACCCA GAAACGCTGG TGAAAGTAAA
5301 AGATGCTGAA GATCAGTTGG GTGCACGAGT GGGTTACATC GAACTGGATC
5351 TCAACAGCGG TAAGATCCTT GAGAGTTTTC GCCCCGAAGA ACGTTTTCCA
5401 ATGATGAGCA CTTTTAAAGT TCTGCTATGT GGCGCGGTAT TATCCCGTAT
5451 TGACGCCGGG CAAGAGCAAC TCGGTCGCCG CATACACTAT TCTCAGAATG
5501 ACTTGGTTGA GTACTCACCA GTCACAGAAA AGCATCTTAC GGATGGCATG
5551 ACAGTAAGAG AATTATGCAG TGCTGCCATA ACCATGAGTG ATAACACTGC
5601 GGCCAACTTA CTTCTGACAA CGATCGGAGG ACCGAAGGAG CTAACCGCTT
5651 TTTTGCACAA CATGGGGGAT CATGTAACTC GCCTTGATCG TTGGGAACCG
5701 GAGCTGAATG AAGCCATACC AAACGACGAG CGTGACACCA CGATGCCTGT
5751 AGCAATGGCA ACAACGTTGC GCAAACTATT AACTGGCGAA CTACTTACTC
5801 TAGCTTCCCG GCAACAATTA ATAGACTGGA TGGAGGCGGA TAAAGTTGCA
5851 GGACCACTTC TGCGCTCGGC CCTTCCGGCT GGCTGGTTTA TTGCTGATAA
5901 ATCTGGAGCC GGTGAGCGTG GGTCTCGCGG TATCATTGCA GCACTGGGGC
5951 CAGATGGTAA GCCCTCCCGT ATCGTAGTTA TCTACACGAC GGGGAGTCAG
6001 GCAACTATGG ATGAACGAAA TAGACAGATC GCTGAGATAG GTGCCTCACT
6051 GATTAAGCAT TGGTAACTGT CAGACCAAGT TTACTCATAT ATACTTTAGA
6101 TTGATTTAAA ACTTCATTTT TAATTTAAAA GGATCTAGGT GAAGATCCTT
6151 TTTGATAATC TCATGACCAA AATCCCTTAA CGTGAGTTTT CGTTCCACTG
6201 AGCGTCAGAC CCCGTAGAAA AGATCAAAGG ATCTTCTTGA GATCCTTTTT
6251 TTCTGCGCGT AATCTGCTGC TTGCAAACAA AAAAACCACC GCTACCAGCG
6301 GTGGTTTGTT TGCCGGATCA AGAGCTACCA ACTCTTTTTC CGAAGGTAAC
6351 TGGCTTCAGC AGAGCGCAGA TACCAAATAC TGTCCTTCTA GTGTAGCCGT
6401 AGTTAGGCCA CCACTTCAAG AACTCTGTAG CACCGCCTAC ATACCTCGCT
6451 CTGCTAATCC TGTTACCAGT GGCTGCTGCC AGTGGCGATA AGTCGTGTCT
6501 TACCGGGTTG GACTCAAGAC GATAGTTACC GGATAAGGCG CAGCGGTCGG
6551 GCTGAACGGG GGGTTCGTGC ACACAGCCCA GCTTGGAGCG AACGACCTAC
6601 ACCGAACTGA GATACCTACA GCGTGAGCTA TGAGAAAGCG CCACGCTTCC
6651 CGAAGGGAGA AAGGCGGACA GGTATCCGGT AAGCGGCAGG GTCGGAACAG
6701 GAGAGCGCAC GAGGGAGCTT CCAGGGGGAA ACGCCTGGTA TCTTTATAGT
6751 CCTGTCGGGT TTCGCCACCT CTGACTTGAG CGTCGATTTT TGTGATGCTC
6801 GTCAGGGGGG CGGAGCCTAT GGAAAAACGC CAGCAACGCG GCCTTTTTAC
6851 GGTTCCTGGC CTTTTGCTGG CCTTTTGCTC ACATGT
AAVC-CBh-eGFP
L-ITR: 1-141
CBh promoter: 159-976
EGFP ORF: 1000-1722
bGHp(A): 1747-1974
R-ITR: 1986-2126
Amp(R): 3043-3900
pUC origin: 4051-4718
SEQ ID NO: 108
      1 CCTGCAGGCA GCTGCGCGCT CGCTCGCTCA CTGAGGCCGC CCGGGCAAAG
    51 CCCGGGCGTC GGGCGACCTT TGGTCGCCCG GCCTCAGTGA GCGAGCGAGC
  101 GCGCAGAGAG GGAGTGGCCA ACTCCATCAC TAGGGGTTCC TGCGGCCTAA
  151 GGCAATTGTT AATAGTAATC AATTACGGGG TCATTAGTTC ATAGCCCATA
  201 TATGGAGTTC CGCGTTACAT AACTTACGGT AAATGGCCCG CCTGGCTGAC
  251 CGCCCAACGA CCCCCGCCCA TTGACGTCAA TAATGACGTA TGTTCCCATA
  301 GTAACGCCAA TAGGGACTTT CCATTGACGT CAATGGGTGG AGTATTTACG
  351 GTAAACTGCC CACTTGGCAG TACATCAAGT GTATCATATG CCAAGTACGC
  401 CCCCTATTGA CGTCAATGAC GGTAAATGGC CCGCCTGGCA TTATGCCCAG
  451 TACATGACCT TACGGGACTT TCCTACTTGG CAGTACATCT CCACGTTCTG
  501 CTTCAGTCTC CCCATCTCCC CCCCCTCCCC ACCCCCAATT TTGTATTTAT
  551 TTATTTTTTA ATTATTTTGT GCAGCGATGG GGGCGGGGGG GGGGGGGGCG
  601 CGCGCCAGGC GGGGCGGGGC GGGGCGAGGG GCGGGGCGGG GCGAGGCGGA
  651 GAGGTGCGGC GGCAGCCAAT CAGAGCGGCG CGCTCCGAAA GTTTCCTTTT
  701 ATGGCGAGGC GGCGGCGGCG GCGGCCCTAT AAAAAGCGAA GCGCGCGGCG
  751 GGGAGTCGCT GCGTTGCCTT CGCCCCGTGC CCCGCTCCGC GCCGCCTCGC
  801 GCCGCCCGCC CCGGCTCTGA CTGACCGCGT TACTCCCACA GGTGAGCGGG
  851 CGGGACGGCC CTTCTCCTCC GGGCTGTAAT TAGCAAGAGG TAAGGGTTTA
  901 AGGGATGGTT GGTTGGTGGG GTATTAATGT TTAATTACCT GTTTTACAGG
  951 CCTGAAATCA CTTGGTTTTA GGTTGGGCTA GCCAAAGCTT GCCGCCACCA
1001 TGGTGTCAAA GGGGGAGGAA CTGTTTACTG GAGTCGTGCC TATTCTGGTC
1051 GAACTGGATG GGGATGTCAA CGGTCATAAG TTTAGCGTGT CCGGAGAGGG
1101 AGAGGGCGAC GCTACCTACG GAAAGCTGAC ACTGAAGTTC ATCTGCACCA
1151 CAGGCAAGCT GCCCGTGCCT TGGCCAACCC TGGTGACCAC ACTGACATAC
1201 GGCGTGCAGT GTTTTAGCCG GTACCCAGAC CACATGAAGC AGCACGATTT
1251 CTTTAAGTCC GCCATGCCCG AGGGATACGT GCAGGAGAGG ACCATCTTCT
1301 TTAAGGACGA TGGCAACTAC AAGACCAGAG CTGAGGTGAA GTTCGAGGGA
1351 GACACACTGG TGAACCGGAT CGAGCTGAAG GGCATCGACT TTAAGGAGGA
1401 TGGAAACATC CTGGGCCACA AGCTGGAGTA CAACTACAAC TCTCACAACG
1451 TGTACATCAT GGCCGATAAG CAGAAGAACG GAATCAAGGT GAACTTCAAG
1501 ATCCGCCACA ACATCGAGGA CGGCAGCGTG CAGCTGGCTG ATCACTACCA
1551 GCAGAACACC CCTATCGGAG ACGGACCCGT GCTGCTGCCT GATAACCACT
1601 ACCTGAGCAC ACAGTCCGCT CTGTCTAAGG ACCCAAACGA GAAGAGGGAT
1651 CACATGGTCC TCCTGGAATT TGTCACTGCT GCTGGGATTA CTCTGGGGAT
1701 GGATGAACTC TATAAGTGAT AAGCGGCCGC AACTCGAGAC TCTAGACGAC
1751 TGTGCCTTCT AGTTGCCAGC CATCTGTTGT TTGCCCCTCC CCCGTGCCTT
1801 CCTTGACCCT GGAAGGTGCC ACTCCCACTG TCCTTTCCTA ATAAAATGAG
1851 GAAATTGCAT CGCATTGTCT GAGTAGGTGT CATTCTATTC TGGGGGGTGG
1901 GGTGGGGCAG GACAGCAAGG GGGAGGATTG GGAAGACAAT AGCAGGCATG
1951 CTGGGGATGC GGTGGGCTCT ATGGCCGCGG GCCGCAGGAA CCCCTAGTGA
2001 TGGAGTTGGC CACTCCCTCT CTGCGCGCTC GCTCGCTCAC TGAGGCCGGG
2051 CGACCAAAGG TCGCCCGACG CCCGGGCTTT GCCCGGGCGG CCTCAGTGAG
2101 CGAGCGAGCG CGCAGCTGCC TGCAGGGGCG CCTGATGCGG TATTTTCTCC
2151 TTACGCATCT GTGCGGTATT TCACACCGCA TACGTCAAAG CAACCATAGT
2201 ACGCGCCCTG TAGCGGCGCA TTAAGCGCGG CGGGTGTGGT GGTTACGCGC
2251 AGCGTGACCG CTACACTTGC CAGCGCCCTA GCGCCCGCTC CTTTCGCTTT
2301 CTTCCCTTCC TTTCTCGCCA CGTTCGCCGG CTTTCCCCGT CAAGCTCTAA
2351 ATCGGGGGCT CCCTTTAGGG TTCCGATTTA GTGCTTTACG GCACCTCGAC
2401 CCCAAAAAAC TTGATTTGGG TGATGGTTCA CGTAGTGGGC CATCGCCCTG
2451 ATAGACGGTT TTTCGCCCTT TGACGTTGGA GTCCACGTTC TTTAATAGTG
2501 GACTCTTGTT CCAAACTGGA ACAACACTCA ACCCTATCTC GGGCTATTCT
2551 TTTGATTTAT AAGGGATTTT GCCGATTTCG GCCTATTGGT TAAAAAATGA
2601 GCTGATTTAA CAAAAATTTA AGGCGAATTT TAACAAAATA TTAACGTTTA
2651 CAATTTTATG GTGCACTCTC AGTACAATCT GCTCTGATGC CGCATAGTTA
2701 AGCCAGCCCC GACACCCGCC AACACCCGCT GACGCGCCCT GACGGGCTTG
2751 TCTGCTCCCG GCATCCGCTT ACAGACAAGC TGTGACCGTC TCCGGGAGCT
2801 GCATGTGTCA GAGGTTTTCA CCGTCATCAC CGAAACGCGC GAGACGAAAG
2851 GGCCTCGTGA TACGCCTATT TTTATAGGTT AATGTCATGA TAATAATGGT
2901 TTCTTAGACG TCAGGTGGCA CTTTTCGGGG AAATGTGCGC GGAACCCCTA
2951 TTTGTTTATT TTTCTAAATA CATTCAAATA TGTATCCGCT CATGAGACAA
3001 TAACCCTGAT AAATGCTTCA ATAATATTGA AAAAGGAAGA GTATGAGTAT
3051 TCAACATTTC CGTGTCGCCC TTATTCCCTT TTTTGCGGCA TTTTGCCTTC
3101 CTGTTTTTGC TCACCCAGAA ACGCTGGTGA AAGTAAAAGA TGCTGAAGAT
3151 CAGTTGGGTG CACGAGTGGG TTACATCGAA CTGGATCTCA ACAGCGGTAA
3201 GATCCTTGAG AGTTTTCGCC CCGAAGAACG TTTTCCAATG ATGAGCACTT
3251 TTAAAGTTCT GCTATGTGGC GCGGTATTAT CCCGTATTGA CGCCGGGCAA
3301 GAGCAACTCG GTCGCCGCAT ACACTATTCT CAGAATGACT TGGTTGAGTA
3351 CTCACCAGTC ACAGAAAAGC ATCTTACGGA TGGCATGACA GTAAGAGAAT
3401 TATGCAGTGC TGCCATAACC ATGAGTGATA ACACTGCGGC CAACTTACTT
3451 CTGACAACGA TCGGAGGACC GAAGGAGCTA ACCGCTTTTT TGCACAACAT
3501 GGGGGATCAT GTAACTCGCC TTGATCGTTG GGAACCGGAG CTGAATGAAG
3551 CCATACCAAA CGACGAGCGT GACACCACGA TGCCTGTAGC AATGGCAACA
3601 ACGTTGCGCA AACTATTAAC TGGCGAACTA CTTACTCTAG CTTCCCGGCA
3651 ACAATTAATA GACTGGATGG AGGCGGATAA AGTTGCAGGA CCACTTCTGC
3701 GCTCGGCCCT TCCGGCTGGC TGGTTTATTG CTGATAAATC TGGAGCCGGT
3751 GAGCGTGGGT CTCGCGGTAT CATTGCAGCA CTGGGGCCAG ATGGTAAGCC
3801 CTCCCGTATC GTAGTTATCT ACACGACGGG GAGTCAGGCA ACTATGGATG
3851 AACGAAATAG ACAGATCGCT GAGATAGGTG CCTCACTGAT TAAGCATTGG
3901 TAACTGTCAG ACCAAGTTTA CTCATATATA CTTTAGATTG ATTTAAAACT
3951 TCATTTTTAA TTTAAAAGGA TCTAGGTGAA GATCCTTTTT GATAATCTCA
4001 TGACCAAAAT CCCTTAACGT GAGTTTTCGT TCCACTGAGC GTCAGACCCC
4051 GTAGAAAAGA TCAAAGGATC TTCTTGAGAT CCTTTTTTTC TGCGCGTAAT
4101 CTGCTGCTTG CAAACAAAAA AACCACCGCT ACCAGCGGTG GTTTGTTTGC
4151 CGGATCAAGA GCTACCAACT CTTTTTCCGA AGGTAACTGG CTTCAGCAGA
4201 GCGCAGATAC CAAATACTGT CCTTCTAGTG TAGCCGTAGT TAGGCCACCA
4251 CTTCAAGAAC TCTGTAGCAC CGCCTACATA CCTCGCTCTG CTAATCCTGT
4301 TACCAGTGGC TGCTGCCAGT GGCGATAAGT CGTGTCTTAC CGGGTTGGAC
4351 TCAAGAGGAT AGTTACCGGA TAAGGCGCAG CGGTCGGGCT GAACGGGGGG
4401 TTCGTGCACA CAGCCCAGCT TGGAGCGAAC GACCTACACC GAACTGAGAT
4451 ACCTACAGCG TGAGCTATGA GAAAGCGCCA CGCTTCCCGA AGGGAGAAAG
4501 GCGGACAGGT ATCCGGTAAG CGGCAGGGTC GGAACAGGAG AGCGCACGAG
4551 GGAGCTTCCA GGGGGAAACG CCTGGTATCT TTATAGTCCT GTCGGGTTTC
4601 GCCACCTCTG ACTTGAGCGT CGATTTTTGT GATGCTCGTC AGGGGGGCGG
4651 AGCCTATGGA AAAACGCCAG CAACGCGGCC TTTTTACGGT TCCTGGCCTT
4701 TTGCTGGCCT TTTGCTCACA
AAVC-CBh-NLS-eGFP
L-ITR: 1-141
CBh promoter: 159-976
NLS-eGFP: 1000-1782
bGHp(A): 1807-2034
R-ITR: 2046-2186
Amp(R): 3103-3960
pUC origin: 4111-4778
SEQ ID NO: 109
      1 CCTGCAGGCA GCTGCGCGCT CGCTCGCTCA CTGAGGCCGC CCGGGCAAAG
    51 CCCGGGCGTC GGGCGACCTT TGGTCGCCCG GCCTCAGTGA GCGAGCGAGC
  101 GCGCAGAGAG GGAGTGGCCA ACTCCATCAC TAGGGGTTCC TGCGGCCTAA
  151 GGCAATTGTT AATAGTAATC AATTACGGGG TCATTAGTTC ATAGCCCATA
  201 TATGGAGTTC CGCGTTACAT AACTTACGGT AAATGGCCCG CCTGGCTGAC
  251 CGCCCAACGA CCCCCGCCCA TTGACGTCAA TAATGACGTA TGTTCCCATA
  301 GTAACGCCAA TAGGGACTTT CCATTGACGT CAATGGGTGG AGTATTTACG
  351 GTAAACTGCC CACTTGGCAG TACATCAAGT GTATCATATG CCAAGTACGC
  401 CCCCTATTGA CGTCAATGAC GGTAAATGGC CCGCCTGGCA TTATGCCCAG
  451 TACATGACCT TACGGGACTT TCCTACTTGG CAGTACATCT CCACGTTCTG
  501 CTTCAGTCTC CCCATCTCCC CCCCCTCCCC ACCCCCAATT TTGTATTTAT
  551 TTATTTTTTA ATTATTTTGT GCAGCGATGG GGGCGGGGGG GGGGGGGGCG
  601 CGCGCCAGGC GGGGCGGGGC GGGGCGAGGG GCGGGGCGGG GCGAGGCGGA
  651 GAGGTGCGGC GGCAGCCAAT CAGAGCGGCG CGCTCCGAAA GTTTCCTTTT
  701 ATGGCGAGGC GGCGGCGGCG GCGGCCCTAT AAAAAGCGAA GCGCGCGGCG
  751 GGGAGTCGCT GCGTTGCCTT CGCCCCGTGC CCCGCTCCGC GCCGCCTCGC
  801 GCCGCCCGCC CCGGCTCTGA CTGACCGCGT TACTCCCACA GGTGAGCGGG
  851 CGGGACGGCC CTTCTCCTCC GGGCTGTAAT TAGCAAGAGG TAAGGGTTTA
  901 AGGGATGGTT GGTTGGTGGG GTATTAATGT TTAATTACCT GTTTTACAGG
  951 CCTGAAATCA CTTGGTTTTA GGTTGGGCTA GCCAAAGCTT GCCGCCACCA
1001 TGGCCCCAAA AAAGAAAAGA AAAGTGAGGT ATCCTGCATT CCTGTACAAA
1051 GTCGCTACTA TGGTGTCAAA AGGTGAAGAG CTGTTCACCG GAGTGGTGCC
1101 CATCCTGGTG GAGCTGGACG GAGATGTGAA CGGCCACAAG TTCAGCGTGT
1151 CCGGAGAGGG AGAGGGCGAC GCCACCTACG GAAAGCTGAC ACTGAAGTTT
1201 ATCTGCACCA CAGGCAAGCT GCCCGTGCCT TGGCCAACCC TGGTGACCAC
1251 ACTGACATAC GGCGTGCAGT GTTTCTCTCG GTACCCAGAC CACATGAAGC
1301 AGCACGATTT CTTTAAGAGC GCCATGCCCG AGGGATACGT GCAGGAGAGG
1351 ACAATCTTCT TTAAGGAGGA TGGCAACTAC AAGACCAGAG CTGAGGTGAA
1401 GTTCGAGGGA GACACACTGG TGAACCGGAT CGAGCTGAAG GGCATCGACT
1451 TTAAGGAGGA TGGAAACATC CTGGGCCACA AGCTGGAGTA CAACTACAAC
1501 TCCCACAACG TGTACATCAT GGCCGATAAG CAGAAGAACG GAATCAAGGT
1551 GAACTTTAAG ATCCGCCACA ACATCGAGGA CGGCTCTGTG CAGCTGGCTG
1601 ATCACTACCA GCAGAACACC CCTATCGGAG ACGGACCCGT GCTGCTGCCT
1651 GATAACCACT ACCTGTCTAC ACAGAGCGCC CTGTCCAAGG ACCCAAACGA
1701 GAAGAGGGAT CACATGGTGC TCCTGGAATT TGTCACTGCT GCCGGTATTA
1751 CTCTCGGGAT GGATGAACTG TATAAATGAT AAGCGGCCGC AACTCGAGAC
1801 TCTAGAGGAC TGTGCCTTCT AGTTGCCAGC CATCTGTTGT TTGCCCCTCC
1851 CCCGTGCCTT CCTTGACCCT GGAAGGTGCC ACTCCCACTG TCCTTTCCTA
1901 ATAAAATGAG GAAATTGCAT CGCATTGTCT GAGTAGGTGT CATTCTATTC
1951 TGGGGGGTGG GGTGGGGCAG GACAGCAAGG GGGAGGATTG GGAAGACAAT
2001 AGCAGGCATG CTGGGGATGC GGTGGGCTCT ATGGCCGCGG GCCGCAGGAA
2051 CCCCTAGTGA TGGAGTTGGC CACTCCCTCT CTGCGCGCTC GCTCGCTCAC
2101 TGAGGCCGGG CGACCAAAGG TCGCCCGACG CCCGGGCTTT GCCCGGGCGG
2151 CCTCAGTGAG CGAGCGAGCG CGCAGCTGCC TGCAGGGGCG CCTGATGCGG
2201 TATTTTCTCC TTACGCATCT GTGCGGTATT TCACACCGCA TACGTCAAAG
2251 CAACCATAGT ACGCGCCCTG TAGCGGCGCA TTAAGCGCGG CGGGTGTGGT
2301 GGTTACGCGC AGCGTGACCG CTACACTTGC CAGCGCCCTA GCGCCCGCTC
2351 CTTTCGCTTT CTTCCCTTCC TTTCTCGCCA CGTTCGCCGG CTTTCCCCGT
2401 CAAGCTCTAA ATCGGGGGCT CCCTTTAGGG TTCCGATTTA GTGCTTTACG
2451 GCACCTCGAC CCCAAAAAAC TTGATTTGGG TGATGGTTCA CGTAGTGGGC
2501 CATCGCCCTG ATAGACGGTT TTTCGCCCTT TGACGTTGGA GTCCACGTTC
2551 TTTAATAGTG GACTCTTGTT CCAAACTGGA ACAACACTCA ACCCTATCTC
2601 GGGCTATTCT TTTGATTTAT AAGGGATTTT GCCGATTTCG GCCTATTGGT
2651 TAAAAAATGA GCTGATTTAA CAAAAATTTA ACGCGAATTT TAACAAAATA
2701 TTAACGTTTA CAATTTTATG GTGCACTCTC AGTACAATCT GCTCTGATGC
2751 CGCATAGTTA AGCCAGCCCC GACACCCGCC AACACCCGCT GACGCGCCCT
2801 GACGGGCTTG TCTGCTCCCG GCATCCGCTT ACAGACAAGC TGTGACCGTC
2851 TCCGGGAGCT GCATGTGTCA GAGGTTTTCA CCGTCATCAC CGAAACGCGC
2901 GAGACGAAAG GGCCTCGTGA TACGCCTATT TTTATAGGTT AATGTCATGA
2951 TAATAATGGT TTCTTAGACG TCAGGTGGCA CTTTTCGGGG AAATGTGCGC
3001 GGAACCCCTA TTTGTTTATT TTTCTAAATA CATTCAAATA TGTATCCGCT
3051 CATGAGACAA TAACCCTGAT AAATGCTTCA ATAATATTGA AAAAGGAAGA
3101 GTATGAGTAT TCAACATTTC CGTGTCGCCC TTATTCCCTT TTTTGCGGCA
3151 TTTTGCCTTC CTGTTTTTGC TCACCCAGAA ACGCTGGTGA AAGTAAAAGA
3201 TGCTGAAGAT CAGTTGGGTG CACGAGTGGG TTACATCGAA CTGGATCTCA
3251 ACAGCGGTAA GATCCTTGAG AGTTTTCGCC CCGAAGAACG TTTTCCAATG
3301 ATGAGCACTT TTAAAGTTCT GCTATGTGGC GCGGTATTAT CCCGTATTGA
3351 CGCCGGGCAA GAGCAACTCG GTCGCCGCAT ACACTATTCT CAGAATGACT
3401 TGGTTGAGTA CTCACCAGTC ACAGAAAAGC ATCTTACGGA TGGCATGACA
3451 GTAAGAGAAT TATGCAGTGC TGCCATAACC ATGAGTGATA ACACTGCGGC
3501 CAACTTACTT CTGACAACGA TCGGAGGACC GAAGGAGCTA ACCGCTTTTT
3551 TGCACAACAT GGGGGATCAT GTAACTCGCC TTGATCGTTG GGAACCGGAG
3601 CTGAATGAAG CCATACCAAA CGACGAGCGT GACACCACGA TGCCTGTAGC
3651 AATGGCAACA ACGTTGCGCA AACTATTAAC TGGCGAACTA CTTACTCTAG
3701 CTTCCCGGCA ACAATTAATA GACTGGATGG AGGCGGATAA AGTTGCAGGA
3751 CCACTTCTGC GCTCGGCCCT TCCGGCTGGC TGGTTTATTG CTGATAAATC
3801 TGGAGCCGGT GAGCGTGGGT CTCGCGGTAT CATTGCAGCA CTGGGGCCAG
3851 ATGGTAAGCC CTCCCGTATC GTAGTTATCT ACACGACGGG GAGTCAGGCA
3901 ACTATGGATG AACGAAATAG ACAGATCGCT GAGATAGGTG CCTCACTGAT
3951 TAAGCATTGG TAACTGTCAG ACCAAGTTTA CTCATATATA CTTTAGATTG
4001 ATTTAAAACT TCATTTTTAA TTTAAAAGGA TCTAGGTGAA GATCCTTTTT
4051 GATAATCTCA TGACCAAAAT CCCTTAACGT GAGTTTTCGT TCCACTGAGC
4101 GTCAGACCCC GTAGAAAAGA TCAAAGGATC TTCTTGAGAT CCTTTTTTTC
4151 TGCGCGTAAT CTGCTGCTTG CAAACAAAAA AACCACCGCT ACCAGCGGTG
4201 GTTTGTTTGC CGGATCAAGA GCTACCAACT CTTTTTCCGA AGGTAACTGG
4251 CTTCAGCAGA GCGCAGATAC CAAATACTGT CCTTCTAGTG TAGCCGTAGT
4301 TAGGCCACCA CTTCAAGAAC TCTGTAGCAC CGCCTACATA CCTCGCTCTG
4351 CTAATCCTGT TACCAGTGGC TGCTGCCAGT GGCGATAAGT CGTGTCTTAC
4401 CGGGTTGGAC TCAAGACGAT AGTTACCGGA TAAGGCGCAG CGGTCGGGCT
4451 GAACGGGGGG TTCGTGCACA CAGCCCAGCT TGGAGCGAAC GACCTACACC
4501 GAACTGAGAT ACCTACAGCG TGAGCTATGA GAAAGCGCCA CGCTTCCCGA
4551 AGGGAGAAAG GCGGACAGGT ATCCGGTAAG CGGCAGGGTC GGAACAGGAG
4601 AGCGCACGAG GGAGCTTCCA GGGGGAAACG CCTGGTATCT TTATAGTCCT
4651 GTCGGGTTTC GCCACCTCTG ACTTGAGCGT CGATTTTTGT GATGCTCGTC
4701 AGGGGGGCGG AGCCTATGGA AAAACGCCAG CAACGCGGCC TTTTTACGGT
4751 TCCTGGCCTT TTGCTGGCCT TTTGCTCACA TGT
AAVC-CBh-mBPIP-TATκ28-hCDKL5-107
L-ITR: 1-141
CBh promoter: 159-976
Bip-TATκ28-hCDKL5-107:1000 - 4065
bGHp(A): 4090-4317
R-ITR: 4329-4469
Amp(R): 5386-6243
pUC origin: 6394-7061
SEQ ID NO: 110
      1 CCTGCAGGCA GCTGCGCGCT CGCTCGCTCA CTGAGGCCGC CCGGGCAAAG
    51 CCCGGGCGTC GGGCGACCTT TGGTCGCCCG GCCTCAGTGA GCGAGCGAGC
  101 GCGCAGAGAG GGAGTGGCCA ACTCCATCAC TAGGGGTTCC TGCGGCCTAA
  151 GGCAATTGTT AATAGTAATC AATTACGGGG TCATTAGTTC ATAGGCCATA
  201 TATGGAGTTC CGCGTTACAT AACTTACGGT AAATGGCCCG CCTGGCTGAC
  251 CGCCCAACGA CCCCCGCCCA TTGACGTCAA TAATGACGTA TGTTCCCATA
  301 GTAACGCCAA TAGGGACTTT CCATTGACGT CAATGGGTGG AGTATTTACG
  351 GTAAACTGCC CACTTGGCAG TACATCAAGT GTATCATATG CCAAGTACGC
  401 CCCCTATTGA CGTCAATGAC GGTAAATGGC CCGCCTGGCA TTATGCCCAG
  451 TACATGACCT TACGGGACTT TCCTACTTGG CAGTACATCT CCACGTTCTG
  501 CTTCACTCTC CCCATCTCCC CCCCCTCCCC ACCCCCAATT TTGTATTTAT
  551 TTATTTTTTA ATTATTTTGT GCAGCGATGG GGGCGGGGGG GGGGGGGGCG
  601 CGCGCCAGGC GGGGCGGGGC GGGGCGAGGG GCGGGGCGGG GCGAGGCGGA
  651 GAGGTGCGGC GGCAGCCAAT CAGAGCGGCG CGCTCCGAAA GTTTCCTTTT
  701 ATGGCGAGGC GGCGGCGGCG GCGGCCCTAT AAAAAGCGAA GCGCGCGGCG
  751 GGGAGTCGCT GCGTTGCCTT CGCCCCGTGC CCCGCTCCGC GCCGCCTCGC
  801 GCCGCCCGCC CCGGCTCTGA CTGACCGCGT TACTCCCACA GGTGAGCGGG
  851 CGGGACGGCC CTTCTCCTCC GGGCTGTAAT TAGCAAGAGG TAAGGGTTTA
  901 AGGGATGGTT GGTTGGTGGG GTATTAATGT TTAATTACCT GTTTTACAGG
  951 CCTGAAATCA CTTGGTTTTA GGTTGGGCTA GCCAAAGCTT GCCGCCACCA
1001 TGAAACTCTC CCTGGTCGCT GCTATGCTGC TCCTCCTGTC CCTGGTCGCT
1051 GCTATGCTCC TGCTGCTGTC TGCCGCTCGG GCTGGTGATG CTGCTCAGCC
1101 AGCTAGGAGA GCTAGGAGGA CCAAGCTGGC TGCTTACGCT AGAAAGGCTG
1151 CTAGACAGGC TAGGGCTGGA GGAGGCGGAT CCAAGATCCC CAACATCGGC
1201 AACGTGATGA ACAAGTTCGA GATCCTGGGA GTGGTGGGAG AGGGAGCTTA
1251 CGGAGTGGTG CTGAAGTGCC GGCACAAGGA GACACACGAG ATCGTGGCTA
1301 TCAAGAAGTT TAAGGACAGC GAGGAGAACG AGGAGGTGAA GGAGACAACC
1351 CTGCGCGAGC TGAAGATGCT GAGGACACTG AAGCAGGAGA ACATCGTGGA
1401 GCTGAAGGAG GCCTTCAGGA GACGGGGAAA GCTGTACCTG GTGTTTGAGT
1451 ACGTGGAGAA GAACATGCTG GAGCTGCTGG AGGAGATGCC AAACGGAGTG
1501 CCACCTGAGA AGGTGAAGTC CTACATCTAC CAGCTGATCA AGGCTATCCA
1551 CTGGTGCCAC AAGAACGACA TCGTGCACCG CGATATCAAG CCTGAGAACC
1601 TGCTGATCTC CCACAACGAC GTGCTGAAGC TGTGCGATTT CGGCTTTGCC
1651 AGGAACCTGA GCGAGGGAAA CAACGCCAAC TACACAGAGT ACGTGGCTAC
1701 CCGCTGGTAC AGGAGCCCAG AGCTGCTGCT GGGAGCTCCA TACGGAAAGA
1751 GCGTGGACAT GTGGTCCGTG GGCTGCATCC TGGGAGAGCT GTCTGACGGC
1801 CAGCCTCTGT TCCCAGGAGA GAGCGAGATC GATCAGCTGT TTACCATCCA
1851 GAAGGTGCTG GGCCCTCTGC CAAGCGAGCA GATGAAGCTG TTCTACTCCA
1901 ACCCTCGCTT CCACGGACTG AGGTTTCCCG CCGTGAACCA CCCTCAGAGC
1951 CTGGAGCGCA GGTACCTGGG CATCCTGAAC TCCGTGCTGC TGGATCTGAT
2001 GAAGAACCTG CTGAAGCTGG ACCCCGCCGA TAGATACCTG ACCGAGCAGT
2051 GTCTGAACCA CCCTACATTT CAGACCCAGA GACTGCTGGA CCGGAGCCCT
2101 TCCCGCTCTG CTAAGAGGAA GCCATACCAC GTGGAGAGCT CCACCCTGTC
2151 CAACCGCAAC CAGGCCGGCA AGTCTACAGC TCTGCAGAGC CACCACAGGA
2201 GCAACTCCAA GGACATCCAG AACCTGTCTG TGGGCCTGCC TAGGGCTGAT
2251 GAGGGACTGC CAGCTAACGA GAGCTTCCTG AACGGCAACC TGGCCGGAGC
2301 TTCTCTGAGC CCACTGCACA CAAAGACCTA CCAGGCCTCT AGCCAGCCCG
2351 GCTCCACATC TAAGGACCTG ACCAACAACA ACATCCCACA CCTGCTGTCT
2401 CCCAAGGAGG CTAAGAGGAA GACCGAGTTC GACTTTAACA TCGATCCCAA
2451 GCCTAGCGAG GGCCCTGGAA CAAAGTACCT GAAGAGCAAC TCCAGATCTC
2501 AGCAGAACCG GCACTCCTTC ATGGAGTCCT CTCAGTCTAA GGCCGGCACC
2551 CTGCAGCCAA AGGAGAAGGA GAGCCGGCAC TCCTACATCG ATACCATCCC
2601 CCAGAGCTCC CGCAGCCCTT CCTACAGGAC AAAGGCCAAG AGCCACGGCG
2651 CTCTGTCTGA CAGCAAGTCC GTGTCTAACC TGTCCGAGGC CAGAGCTCAG
2701 ATCGCTGAGC CAAGCACCTC CAGGTACTTT CCTTCTAGCT GTCTGGACCT
2751 GAACTCTCCT ACAAGCCCAA CACCCACCAG ACACAGCGAT ACACGGACCC
2801 TGCTGTCTCC AAGCGGCAGA AACAACCGGA ACGAGGGAAC CCTGGATTCT
2851 AGACGGACCA CAACCAGGCA CAGCAAGACA ATGGAGGAGC TGAAGCTGCC
2901 AGAGCACATG GACTCCTCTC ACTCCCACTC TCTGAGCGCC CCCCACGAGT
2951 CCTTCTCTTA CGGCCTGGGA TACACCTCCC CCTTCAGCTC CCAGCAGCGC
3001 CCCCACAGGC ACTCTATGTA CGTGACAAGA GACAAGGTGC GGGCCAAGGG
3051 CCTGGATGGA AGCCTGTCCA TCGGCCAGGG AATGGCCGCT AGAGCTAACT
3101 CCCTGCAGCT GCTGTCTCCT CAGCCAGGAG AGCAGCTGCC ACCCGAGATG
3151 ACCGTGGCCA GATCTAGCGT GAAGGAGACA AGCCGGGAGG GCACCTCCTC
3201 TTTCCACACA AGACAGAAGT CCGAGGGCGG AGTGTACCAC GACCCCCACT
3251 CTGACGATGG AACAGCTCCT AAGGAGAACC GGCACCTGTA CAACGATCCC
3301 GTGCCTCGCA GGGTGGGCTC CTTCTACCGC GTGCCATCTC CCAGGCCTGA
3351 CAACAGCTTT CACGAGAACA ACGTGTCCAC CAGAGTGAGC TCCCTGCCAT
3401 CTGAGTCTAG CTCCGGAACA AACCACTCTA AGCGGCAGCC CGCCTTCGAT
3451 CCTTGGAAGA GCCCAGAGAA CATCTCTCAC AGCGAGCAGC TGAAGGAGAA
3501 GGAGAAGCAG GGCTTCTTTC GCAGCATGAA GAAGAAGAAG AAGAAGAGCC
3551 AGACCGTGCC TAACTCCGAC TCTCCAGATC TGCTGACCCT GCAGAAGTCC
3601 ATCCACAGCG CCTCCACACC CTCTAGCAGA CCTAAGGAGT GGCGGCCTGA
3651 GAAGATCAGC GATCTGCAGA CACAGAGCCA GCCACTGAAG TCCCTGAGGA
3701 AGCTGCTGCA CCTGTCCTCT GCCAGCAACC ACCCAGCTAG CTCCGACCCA
3751 AGGTTCCAGC CACTGACAGC TCAGCAGACC AAGAACTCTT TTAGCGAGAT
3801 CAGGATCCAC CCTCTGTCCC AGGCTTCTGG CGGATCTAGC AACATCAGGC
3851 AGGAGCCAGC TCCAAAGGGC AGGCCCGCTC TGCAGCTGCC TGGACAGATG
3901 GACCCAGGAT GGCACGTGTC CTCTGTGACA AGGTCCGCCA CCGAGGGACC
3951 ATCCTACTCT GAGCAGCTGG GCGCTAAGTC TGGCCCTAAC GGACACCCAT
4001 ACAACCGAAC AAATAGAAGT AGGATGCCAA ACCTCAATGA CCTCAAGGAA
4051 ACTGCCCTGT GATAAGCGGC CGCAACTCGA GACTCTAGAC GACTGTGCCT
4101 TCTAGTTGCC AGCCATCTGT TGTTTGCCCC TCCCCCGTGC CTTCCTTGAC
4151 CCTGGAAGGT GCCACTCCCA CTGTCCTTTC CTAATAAAAT GAGGAAATTG
4201 CATCGCATTG TCTGAGTAGG TGTCATTCTA TTCTGGGGGG TGGGGTGGGG
4251 CAGGACAGCA AGGGGGAGGA TTGGGAAGAC AATAGGAGGC ATGCTGGGGA
4301 TGCGGTGGGC TCTATGGCCG CGGGCCGCAG GAACCCCTAG TGATGGAGTT
4351 GGCCACTCCC TCTCTGCGCG CTCGCTCGCT CACTGAGGCC GGGCGACCAA
4401 AGGTCGCCCG ACGCCCGGGC TTTGCCCGGG CGGCCTCAGT GAGCGAGCGA
4451 GCGCGCAGCT GCCTGCAGGG GCGCCTGATG CGGTATTTTC TCCTTACGCA
4501 TCTGTGCGGT ATTTCACACC GCATACGTCA AAGCAACCAT AGTACGCGCC
4551 CTGTAGCGGC GCATTAAGCG CGGCGGGTGT GGTGGTTACG CGCAGCGTGA
4601 CCGCTACACT TGCCAGCGCC CTAGCGCCCG CTCCTTTCGC TTTCTTCCCT
4651 TCCTTTCTCG CCACGTTCGC CGGCTTTCCC CGTCAAGCTC TAAATCGGGG
4701 GCTCCCTTTA GGGTTCCGAT TTAGTGCTTT ACGGCACCTC GACCCCAAAA
4751 AACTTGATTT GGGTGATGGT TCACGTAGTG GGCCATCGCC CTGATAGACG
4801 GTTTTTCGCC CTTTGACGTT GGAGTCCACG TTCTTTAATA GTGGACTCTT
4851 GTTCCAAACT GGAACAACAC TCAACCCTAT CTCGGGCTAT TCTTTTGATT
4901 TATAAGGGAT TTTGCCGATT TCGGCCTATT GGTTAAAAAA TGAGCTGATT
4951 TAACAAAAAT TTAACGCGAA TTTTAACAAA ATATTAACGT TTACAATTTT
5001 ATGGTGCACT CTCAGTACAA TCTGCTCTGA TGCCGCATAG TTAAGCCAGC
5051 CCCGACACCC GCCAACACCC GCTGACGCGC CCTGACGGGC TTGTCTGCTC
5101 CCGGCATCCG CTTACAGACA AGCTGTGACC GTCTCCGGGA GCTGCATGTG
5151 TCAGAGGTTT TCACCGTCAT CACCGAAACG CGCGAGACGA AAGGGCCTCG
5201 TGATACGCCT ATTTTTATAG GTTAATGTCA TGATAATAAT GGTTTCTTAG
5251 ACGTCAGGTG GCACTTTTCG GGGAAATGTG CGCGGAACCC CTATTTGTTT
5301 ATTTTTCTAA ATACATTCAA ATATGTATCC GCTCATGAGA CAATAACCCT
5351 GATAAATGCT TCAATAATAT TGAAAAAGGA AGAGTATGAG TATTCAACAT
5401 TTCCGTGTCG CCCTTATTCC CTTTTTTGGG GCATTTTGCC TTCCTGTTTT
5451 TGCTCACCCA GAAACGCTGG TGAAAGTAAA AGATGCTGAA GATCAGTTGG
5501 GTGCACGAGT GGGTTACATC GAACTGGATC TCAACAGCGG TAAGATCCTT
5551 GAGAGTTTTC GCCCCGAAGA ACGTTTTCCA ATGATGAGCA CTTTTAAAGT
5601 TCTGCTATGT GGCGCGGTAT TATCCCGTAT TGACGCCGGG CAAGAGCAAC
5651 TCGGTCGCCG CATACACTAT TCTCAGAATG ACTTGGTTGA GTACTCACCA
5701 GTCACAGAAA AGCATCTTAC GGATGGCATG ACAGTAAGAG AATTATGCAG
5751 TGCTGCCATA ACCATGAGTG ATAACACTGC GGCCAACTTA CTTCTGACAA
5801 CGATCGGAGG ACCGAAGGAG CTAACCGCTT TTTTGCACAA CATGGGGGAT
5851 CATGTAACTC GCCTTGATCG TTGGGAACCG GAGCTGAATG AAGCCATACC
5901 AAAGGAGGAG CGTGACACCA CGATGCCTGT AGCAATGGCA ACAACGTTGC
5951 GCAAACTATT AACTGGCGAA CTACTTACTC TAGCTTCCCG GCAACAATTA
6001 ATAGACTGGA TGGAGGCGGA TAAAGTTGCA GGACCACTTC TGCGCTCGGC
6051 CCTTCCGGCT GGCTGGTTTA TTGCTGATAA ATCTGGAGCC GGTGAGCGTG
6101 GGTCTCGCGG TATCATTGCA GCACTGGGGC CAGATGGTAA GCCCTCCCGT
6151 ATCGTAGTTA TCTACACGAC GGGGAGTCAG GCAACTATGG ATGAACGAAA
6201 TAGACAGATC GCTGAGATAG GTGCCTCACT GATTAAGCAT TGGTAACTGT
6251 CAGACCAAGT TTACTCATAT ATACTTTAGA TTGATTTAAA ACTTCATTTT
6301 TAATTTAAAA GGATCTAGGT GAAGATCCTT TTTGATAATC TCATGACCAA
6351 AATCCCTTAA CGTGAGTTTT CGTTCCACTG AGCGTCAGAC CCCGTAGAAA
6401 AGATCAAAGG ATCTTCTTGA GATCCTTTTT TTCTGCGCGT AATCTGCTGC
6451 TTGCAAACAA AAAAACCACC GCTACCAGCG GTGGTTTGTT TGCCGGATCA
6501 AGAGCTACCA ACTCTTTTTC CGAAGGTAAC TGGCTTCAGC AGAGCGCAGA
6551 TACCAAATAC TGTCCTTCTA GTGTAGCCGT AGTTAGGCCA CCACTTCAAG
6601 AACTCTGTAG CACCGCCTAC ATACCTCGCT CTGCTAATCC TGTTACCAGT
6651 GGCTGCTGCC AGTGGCGATA AGTCGTGTCT TACCGGGTTG GACTCAAGAC
6701 GATAGTTACC GGATAAGGCG CAGCGGTCGG GCTGAACGGG GGGTTCGTGC
6751 ACACAGCCCA GCTTGGAGCG AACGACCTAC ACCGAACTGA GATACCTACA
6801 GCGTGAGCTA TGAGAAAGCG CCACGCTTCC CGAAGGGAGA AAGGCGGACA
6851 GGTATCCGGT AAGCGGCAGG GTCGGAACAG GAGAGCGCAC GAGGGAGCTT
6901 CCAGGGGGAA ACGCCTGGTA TCTTTATAGT CCTGTCGGGT TTCGCCACCT
6951 CTGACTTGAG CGTCGATTTT TGTGATGCTC GTCAGGGGGG CGGAGCCTAT
7001 GGAAAAACGC CAGCAACGCG GCCTTTTTAC GGTTCCTGGC CTTTTGCTGG
7051 CCTTTTGCTC ACATGT
AAVC-CBh-mBPIP-TATκ28-hCDKL5-107
L-ITR: 1-141
CBh promoter: 159-976
Bip-TATκ28-hCDKL5-107 (kinase dead): 1000 - 4065
bGHp(A): 4090-4317
R-ITR: 4329-4469
Amp(R): 5386-6243
pUC origin: 6394-7061
SEQ ID NO: 111
      1 CCTGCAGGCA GCTGCGCGCT CGCTCGCTCA CTGAGGCCGC CCGGGCAAAG
    51 CCCGGGCGTC GGGCGACCTT TGGTCGCCCG GCCTCAGTGA GCGAGCGAGC
  101 GCGCAGAGAG GGAGTGGCCA ACTCCATCAC TAGGGGTTCC TGCGGCCTAA
  151 GGCAATTGTT AATAGTAATC AATTACGGGG TCATTAGTTC ATAGCCCATA
  201 TATGGAGTTC CGCGTTACAT AACTTACGGT AAATGGCCCG CCTGGCTGAC
  251 CGCCCAACGA CCCCCGCCCA TTGACGTCAA TAATGACGTA TGTTCCCATA
  301 GTAACGCCAA TAGGGACTTT CCATTGACGT CAATGGGTGG AGTATTTACG
  351 GTAAACTGCC CACTTGGCAG TACATCAAGT GTATCATATG CCAAGTACGC
  401 CCCCTATTGA CGTCAATGAC GGTAAATGGC CCGCCTGGCA TTATGCCCAG
  451 TACATGACCT TACGGGACTT TCCTACTTGG CAGTACATCT CCACGTTCTG
  501 CTTCACTCTC CCCATCTCCC CCCCCTCCCC ACCCCCAATT TTGTATTTAT
  551 TTATTTTTTA ATTATTTTGT GCAGCGATGG GGGCGGGGGG GGGGGGGGCG
  601 CGCGCCAGGC GGGGCGGGGC GGGGCGAGGG GCGGGGCGGG GCGAGGCGGA
  651 GAGGTGCGGC GGCAGCCAAT CAGAGCGGCG CGCTCCGAAA GTTTCCTTTT
  701 ATGGGGAGGC GGCGGCGGCG GCGGCCCTAT AAAAAGCGAA GCGCGCGGCG
  751 GGGAGTCGCT GCGTTGCCTT CGCCCCGTGC CCCGCTCCGC GCCGCCTCGC
  801 GCCGCCCGCC CCGGCTCTGA CTGACCGCGT TACTCCCACA GGTGAGCGGG
  851 CGGGACGGCC CTTCTCCTCC GGGCTGTAAT TAGCAAGAGG TAAGGGTTTA
  901 AGGGATGGTT GGTTGGTGGG GTATTAATGT TTAATTACCT GTTTTACAGG
  951 CCTGAAATCA CTTGGTTTTA GGTTGGGCTA GCCAAAGCTT GCCGCCACCA
1001 TGAAACTCTC CCTCGTCGCC GCTATGCTCC TGCTCCTCTC CCTCGTCGCT
1051 GCCATGCTCC TGCTGCTCAG TGCCGCTCGG GCCGGAGATG CTGCTCAGCC
1101 AGCTAGGAGA GCTAGGAGGA CCAAGCTGGC TGCTTACGCT AGGAAGGCTG
1151 CTAGGCAGGC TAGGGCTGGC GGAGGCGGAT CCAAGATCCC CAACATCGGC
1201 AACGTGATGA ACAAGTTCGA GATCCTGGGA GTGGTGGGAG AGGGAGCTTA
1251 CGGAGTGGTG CTGAAGTGCA GGCACAAGGA GACACACGAG ATCGTGGCTA
1301 TCAGGAGGTT CAAGGACAGC GAGGAGAACG AGGAGGTGAA GGAGACAACC
1351 CTGAGAGAGC TGAAGATGCT GCGGACACTG AAGCAGGAGA ACATCGTGGA
1401 GCTGAAGGAG GCCTTCCGGC GCAGGGGAAA GCTGTACCTG GTGTTTGAGT
1451 ACGTGGAGAA GAACATGCTG GAGCTGCTGG AGGAGATGCC AAACGGAGTG
1501 CCACCTGAGA AGGTGAAGTC CTACATCTAC CAGCTGATCA AGGCTATCCA
1551 CTGGTGCCAC AAGAACGACA TCGTGCACAG AGATATCAAG CCTGAGAACC
1601 TGCTGATCTC CCACAACGAC GTGCTGAAGC TGTGCGATTT CGGCTTTGCC
1651 CGGAACCTGA GCGAGGGAAA CAACGCCAAC TACACAGAGT ACGTGGCTAC
1701 CAGATGGTAC CGGAGCCCAG AGCTGCTGCT GGGAGCTCCA TACGGAAAGA
1751 GCGTGGACAT GTGGTCCGTG GGCTGCATCC TGGGAGAGCT GTCTGACGGC
1801 CAGCCTCTGT TCCCAGGAGA GAGCGAGATC GATCAGCTGT TTACCATCCA
1851 GAAGGTGCTG GGCCCTCTGC CAAGCGAGCA GATGAAGCTG TTCTACTCCA
1901 ACCCTAGATT CCACGGACTG CGGTTTCCCG CCGTGAACCA CCCTCAGAGC
1951 CTGGAGAGAC GGTACCTGGG CATCCTGAAC TCCGTGCTGC TGGATCTGAT
2001 GAAGAACCTG CTGAAGCTGG ACCCCGCCGA TCGCTACCTG ACCGAGCAGT
2051 GTCTGAACCA CCCTACATTT CAGACCCAGC GCCTGCTGGA CAGGAGCCCT
2101 TCCAGATCTG CTAAGCGGAA GCCATACCAC GTGGAGAGCT CCACCCTGTC
2151 CAACAGAAAC CAGGCCGGCA AGTCTACAGC TCTGCAGAGC CACCACCGGA
2201 GCAACTCCAA GGACATCCAG AACCTGTCTG TGGGCCTGCC TAGAGCCGAT
2251 GAGGGACTGC CAGCTAACGA GAGCTTCCTG AACGGCAACC TGGCCGGAGC
2301 TTCTCTGAGC CCACTGCACA CAAAGACCTA CCAGGCCTCT AGCCAGCCCG
2351 GCTCCACATC TAAGGACCTG ACCAACAACA ACATCCCACA CCTGCTGTCT
2401 CCCAAGGAGG CTAAGAGCAA GACCGAGTTC GACTTTAACA TCGATCCCAA
2451 GCCTAGCGAG GGCCCTGGAA CAAAGTACCT GAAGAGCAAC TCCCGCTCTC
2501 AGCAGAACAG GCACTCCTTC ATGGAGTCCT CTCAGTCTAA GGCCGGCACC
2551 CTGCAGCCAA ACGAGAAGCA GAGCAGACAC TCCTACATCG ATACCATCCC
2601 CCAGAGCTCC AGAAGCCCTT CCTACCGGAC AAAGGCCAAG AGCCACGGCG
2651 CTCTGTCTGA CAGCAAGTCC GTGTCTAACC TGTCCGAGGC TAGGGCTCAG
2701 ATCGCTGAGC CCAGCACCTC CAGGTACTTT CCTTCTAGCT GTCTGGACCT
2751 GAACTCTCCT ACAAGCCCAA CACCCACCCG CCACAGCGAT ACAAGGACCC
2801 TGCTGTCTCC AAGCGGCAGG AACAACAGGA ACGAGGGAAC CCTGGATTCT
2851 CGCAGGACCA CAACCCGGCA CAGCAAGACA ATGGAGGAGC TGAAGCTGCC
2901 AGAGCACATG GACTCCTCTC ACTCCCACTC TCTGAGCGCC CCCCACGAGT
2951 CCTTCTCTTA CGGCCTGGGA TACACCTCCC CCTTCAGCTC CCAGCAGAGG
3001 CCCCACAGGC ACTCTATGTA CGTGACACGC GACAAGGTGA GGGCCAAGGG
3051 CCTGGATGGA AGCCTGTCCA TCGGCCAGGG AATGGCCGCT AGGGCTAACT
3101 CCCTGCAGCT GCTGTCTCCT CAGCCAGGAG AGCAGCTGCC ACCAGAGATG
3151 ACCGTGGCTC GCTCTAGCGT GAAGGAGACA AGCAGGGAGG GCACCTCCTC
3201 TTTCCACACA CGCCAGAAGT CCGAGGGCGG AGTGTACCAC GACCCCCACT
3251 CTGACGATGG AACAGCTCCT AAGGAGAACA GGCACCTGTA CAACGATCCC
3301 GTGCCTAGAC GGGTGGGCTC CTTCTACAGA GTGCCATCTC CCCGGCCTGA
3351 CAACAGCTTT CACGAGAACA ACGTGTCCAC CCGCGTGAGC TCCCTGCCAT
3401 CTGAGTCTAG CTCCGGAACA AACCACTCTA AGAGGCAGCC CGCCTTCGAT
3451 CCTTGGAAGA GCCCAGAGAA CATCTCTCAC AGCGAGCAGC TGAAGGAGAA
3501 GGAGAAGCAG GGCTTCTTTA GAAGCATGAA GAAGAAGAAG AAGAAGAGCC
3551 AGACCGTGCC TAACTCCGAC TCTCCAGATC TGCTGACCCT GCAGAAGTCC
3601 ATCCACAGCG CCTCCACACC ATCTAGCCGC CCTAAGGAGT GGAGGCCTGA
3651 GAAGATCAGC GATCTGCAGA CACAGAGCCA GCCACTGAAG TCCCTGCGGA
3701 AGCTGCTGCA CCTGTCCTCT GCCAGCAACC ACCCCGCTAG CTCCGACCCA
3751 AGATTCCAGC CCCTGACAGC CCAGCAGACC AAGAACTCTT TTAGCGAGAT
3801 CCGGATCCAC CCTCTGTCCC AGGCTTCTGG CGGATCTAGC AACATCAGAC
3851 AGGAGCCAGC TCCAAAGGGC CGGCCCGCTC TGCAGCTGCC TGGCCAGATG
3901 GACCCAGGAT GGCACGTGTC CTCTGTGACA AGGTCCGCCA CCGAGGGACC
3951 ATCCTACTCT GAGCAGCTGG GCGCTAAGTC TGGCCCTAAC GGACACCCAT
4001 ACAATAGGAC TAATCGCAGC AGAATGCCCA ACCTGAACGA CCTCAAGGAA
4051 ACAGCACTCT GATAAGCGGC CGCAACTCGA GACTCTAGAC GACTGTGCCT
4101 TCTAGTTGCC AGCCATCTGT TGTTTGCCCC TCCCCCGTGC CTTCCTTGAC
4151 CCTGGAAGGT GCCACTCCCA CTGTCCTTTC CTAATAAAAT GAGGAAATTG
4201 CATCGCATTG TCTGAGTAGG TGTCATTCTA TTCTGGGGGG TGGGGTGGGG
4251 CAGGACAGCA AGGGGGAGGA TTGGGAAGAC AATAGGAGGC ATGCTGGGGA
4301 TGCGGTGGGC TCTATGGCCG CGGGCCGCAG GAACCCCTAG TGATGGAGTT
4351 GGCCACTCCC TCTCTGCGCG CTCGCTCGCT CACTGAGGCC GGGCGACCAA
4401 AGGTCGCCCG ACGCCCGGGC TTTGCCCGGG CGGCCTCAGT GAGCGAGCGA
4451 GCGCGCAGCT GCCTGCAGGG GCGCCTGATG CGGTATTTTC TCCTTACGCA
4501 TCTGTGCGGT ATTTCACACC GCATACGTCA AAGCAACCAT AGTACGCGCC
4551 CTGTAGCGGC GCATTAAGCG CGGCGGGTGT GGTGGTTACG CGCAGCGTGA
4601 CCGCTACACT TGCCAGCGCC CTAGCGCCCG CTCCTTTCGC TTTCTTCCCT
4651 TCCTTTCTCG CCACGTTCGC CGGCTTTCCC CGTCAAGCTC TAAATCGGGG
4701 GCTCCCTTTA GGGTTCCGAT TTAGTGCTTT ACGGCACCTC GACCCCAAAA
4751 AACTTGATTT GGGTGATGGT TCACGTAGTG GGCCATCGCC CTGATAGACG
4801 GTTTTTCGCC CTTTGACGTT GGAGTCCACG TTCTTTAATA GTGGACTCTT
4851 GTTCCAAACT GGAACAACAC TCAACCCTAT CTCGGGCTAT TCTTTTGATT
4901 TATAAGGGAT TTTGCCGATT TCGGCCTATT GGTTAAAAAA TGAGCTGATT
4951 TAACAAAAAT TTAACGCGAA TTTTAACAAA ATATTAACGT TTACAATTTT
5001 ATGGTGCACT CTCAGTACAA TCTGCTCTGA TGCCGCATAG TTAAGCCAGC
5051 CCCGACACCC GCCAACACCC GCTGACGCGC CCTGACGGGC TTGTCTGCTC
5101 CCGGCATCCG CTTACAGACA AGCTGTGACC GTCTCCGGGA GCTGCATGTG
5151 TCAGAGGTTT TCACCGTCAT CACCGAAACG CGCGAGACGA AAGGGCCTCG
5201 TGATACGCCT ATTTTTATAG GTTAATGTCA TGATAATAAT GGTTTCTTAG
5251 ACGTCAGGTG GCACTTTTCG GGGAAATGTG CGCGGAACCC CTATTTGTTT
5301 ATTTTTCTAA ATACATTCAA ATATGTATCC GCTCATGAGA CAATAACCCT
5351 GATAAATGCT TCAATAATAT TGAAAAAGGA AGAGTATGAG TATTCAACAT
5401 TTCCGTGTCG CCCTTATTCC CTTTTTTGGG GCATTTTGCC TTCCTGTTTT
5451 TGCTCACCCA GAAACGCTGG TGAAAGTAAA AGATGCTGAA GATCAGTTGG
5501 GTGCACGAGT GGGTTACATC GAACTGGATC TCAACAGCGG TAAGATCCTT
5551 GAGAGTTTTC GCCCCGAAGA ACGTTTTCCA ATGATGAGCA CTTTTAAAGT
5601 TCTGCTATGT GGCGCGGTAT TATCCCGTAT TGACGCCGGG CAAGAGCAAC
5651 TCGGTCGCCG CATACACTAT TCTCAGAATG ACTTGGTTGA GTACTCACCA
5701 GTCACAGAAA AGCATCTTAC GGATGGCATG ACAGTAAGAG AATTATGCAG
5751 TGCTGCCATA ACCATGAGTG ATAACACTGC GGCCAACTTA CTTCTGACAA
5801 CGATCGGAGG ACCGAAGGAG CTAACCGCTT TTTTGCACAA CATGGGGGAT
5851 CATGTAACTC GCCTTGATCG TTGGGAACCG GAGCTGAATG AAGCCATACC
5901 AAACGACGAG CGTGACACCA CGATGCCTGT AGCAATGGCA ACAACGTTGC
5951 GCAAACTATT AACTGGCGAA CTACTTACTC TAGCTTCCCG GCAACAATTA
6001 ATAGACTGGA TGGAGGCGGA TAAAGTTGCA GGACCACTTC TGCGCTCGGC
6051 CCTTCCGGCT GGCTGGTTTA TTGCTGATAA ATCTGGAGCC GGTGAGCGTG
6101 GGTCTCGCGG TATCATTGCA GCACTGGGGC CAGATGGTAA GCCCTCCCGT
6151 ATCGTAGTTA TCTACAGGAC GGGGAGTCAG GCAACTATGG ATGAACGAAA
6201 TAGACAGATC GCTGAGATAG GTGCCTCACT GATTAAGCAT TGGTAACTGT
6251 CAGACCAAGT TTACTCATAT ATACTTTAGA TTGATTTAAA ACTTCATTTT
6301 TAATTTAAAA GGATCTAGGT GAAGATCCTT TTTGATAATC TCATGACCAA
6351 AATCCCTTAA CGTGAGTTTT CGTTCCACTG AGCGTCAGAC CCCGTAGAAA
6401 AGATCAAAGG ATCTTCTTGA GATCCTTTTT TTCTGCGCGT AATCTGCTGC
6451 TTGCAAACAA AAAAACCACC GCTACCAGCG GTGGTTTGTT TGCCGGATCA
6501 AGAGCTACCA ACTCTTTTTC CGAAGGTAAC TGGCTTCAGC AGAGCGCAGA
6551 TAGCAAATAC TGTCCTTCTA GTGTAGCCGT AGTTAGGCCA CCACTTCAAG
6601 AACTCTGTAG CACCGCCTAC ATACCTCGCT CTGCTAATCC TGTTACCAGT
6651 GGCTGCTGCC AGTGGCGATA AGTCGTGTCT TACCGGGTTG GACTCAAGAC
6701 GATAGTTACC GGATAAGGCG CAGCGGTCGG GCTGAACGGG GGGTTCGTGC
6751 ACACAGCCCA GCTTGGAGCG AACGACCTAC ACCGAACTGA GATACCTACA
6801 GCGTGAGCTA TGAGAAAGCG CCACGCTTCC CGAAGGGAGA AAGGCGGACA
6851 GGTATCCGGT AAGCGGCAGG GTCGGAACAG GAGAGCGCAC GAGGGAGCTT
6901 CCAGGGGGAA ACGCCTGGTA TCTTTATAGT CCTGTCGGGT TTCGCCACCT
6951 CTGACTTGAG CGTCGATTTT TGTGATGCTC GTCAGGGGGG CGGAGCCTAT
7001 GGAAAAACGC CAGCAACGCG GCCTTTTTAC GGTTCCTGGC CTTTTGCTGG
7051 CCTTTTGCTC ACATGT
AAVC-CBh-mBPIP-TATκ28-eGFP
L-ITR: 1-141
CBh promoter: 159-976
Bip-TATκ28-EGFP: 1000-1905
bGHp(A): 1930-2157
R-ITR: 2169-2309
Amp(R):3226-4083
pUC origin: 4234-4901
SEQ ID NO: 112
      1 CCTGCAGGCA GCTGCGCGCT CGCTCGCTCA CTGAGGCCGC CCGGGCAAAG
    51 CCCGGGCGTC GGGCGACCTT TGGTCGCCCG GCCTCAGTGA GCGAGCGAGC
  101 GCGCAGAGAG GGAGTGGCCA ACTCCATCAC TAGGGGTTCC TGCGGCCTAA
  151 GGCAATTGTT AATAGTAATC AATTACGGGG TCATTAGTTC ATAGCCCATA
  201 TATGGAGTTC CGCGTTACAT AACTTACGGT AAATGGCCCG CCTGGCTGAC
  251 CGCCCAACGA CCCCCGCCCA TTGACGTCAA TAATGACGTA TGTTCCCATA
  301 GTAACGCCAA TAGGGACTTT CCATTGACGT CAATGGGTGG AGTATTTACG
  351 GTAAACTGCC CACTTGGCAG TACATCAAGT GTATCATATG CCAAGTACGC
  401 CCCCTATTGA CGTCAATGAC GGTAAATGGC CCGCCTGGCA TTATGCCCAG
  451 TACATGACCT TACGGGACTT TCCTACTTGG CAGTACATCT CCACGTTCTG
  501 CTTCAGTCTC CCCATCTCCC CCCCCTCCCC ACCCCCAATT TTGTATTTAT
  551 TTATTTTTTA ATTATTTTGT GCAGCGATGG GGGCGGGGGG GGGGGGGGCG
  601 CGCGCCAGGC GGGGCGGGGC GGGGCGAGGG GCGGGGCGGG GCGAGGCGGA
  651 GAGGTGCGGC GGCAGCCAAT CAGAGCGGCG CGCTCCGAAA GTTTCCTTTT
  701 ATGGCGAGGC GGCGGCGGCG GCGGCCCTAT AAAAAGCGAA GCGCGCGGCG
  751 GGGAGTCGCT GCGTTGCCTT CGCCCCGTGC CCCGCTCCGC GCCGCCTCGC
  801 GCCGCCCGCC CCGGCTCTGA CTGACCGCGT TACTCCCACA GGTGAGCGGG
  851 CGGGACGGCC CTTCTCCTCC GGGCTGTAAT TAGCAAGAGG TAAGGGTTTA
  901 AGGGATGGTT GGTTGGTGGG GTATTAATGT TTAATTACCT GTTTTACAGG
  951 CCTGAAATCA CTTGGTTTTA GGTTGGGCTA GCCAAAGCTT GCCGCCACCA
1001 TGAAACTGTC CCTGGTCGCC GCCATGCTGC TCCTCCTGTC ACTGGTCGCC
1051 GCTATGCTGC TCCTCCTCTC CGCTGCTCGG GCTGGGGACG CTGCTCAGCC
1101 AGCTAGGAGA GCTAGGAGGA CCAAGCTGGC TGCTTACGCT AGGAAGGCTG
1151 CTAGGCAGGC TAGAGCTGGA GGAGGCGGAT CTATGGTGAG CAAGGGAGAG
1201 GAGCTGTTCA CAGGCGTGGT GCCCATCCTG GTGGAGCTGG ACGGAGATGT
1251 GAACGGCCAC AAGTTTAGCG TGTCCGGAGA GGGAGAGGGC GACGCTACCT
1301 ACGGAAAGCT GACACTGAAG TTCATCTGCA CCACAGGCAA GCTGCCCGTG
1351 CCTTGGCCAA CCCTGGTGAC CACACTGACA TACGGCGTGC AGTGTTTTTC
1401 CAGGTACCCA GACCACATGA AGCAGCACGA TTTCTTTAAG TCTGCCATGC
1451 CCGAGGGATA CGTGCAGGAG CGGACCATCT TCTTTAAGGA CGATGGCAAC
1501 TACAAGACCC GCGCTGAGGT GAAGTTCGAG GGAGACACAC TGGTGAACAG
1551 GATCGAGCTG AAGGGCATCG ACTTTAAGGA GGATGGAAAC ATCCTGGGCC
1601 ACAAGCTGGA GTACAACTAC AACAGCCACA ACGTGTACAT CATGGCCGAT
1651 AAGCAGAAGA ACGGAATCAA GGTGAACTTC AAGATCAGAC ACAACATCGA
1701 GGACGGCTCC GTGCAGCTGG CTGATCACTA CCAGCAGAAC ACCCCTATCG
1751 GAGACGGACC CGTGCTGCTG CCTGATAACC ACTACCTGTC CACACAGTCT
1801 GCCCTGAGCA AGGACCCAAA CGAGAAGCGG GATCACATGG TGCTGCTGGA
1851 ATTTGTGACT GCTGCTGGTA TTACACTGGG TATGGATGAA CTCTATAAAT
1901 GATAAGCGGC CGCAACTCGA GACTCTAGAC GACTGTGCCT TCTAGTTGCC
1951 AGCCATCTGT TGTTTGCCCC TCCCCCGTGC CTTCCTTGAC CCTGGAAGGT
2001 GCCACTCCCA CTGTCCTTTC CTAATAAAAT GAGGAAATTG CATCGCATTG
2051 TCTGAGTAGG TGTCATTCTA TTCTGGGGGG TGGGGTGGGG CAGGACAGCA
2101 AGGGGGAGGA TTGGGAAGAC AATAGCAGGC ATGCTGGGGA TGCGGTGGGC
2151 TCTATGGCCG CGGGCCGCAG GAACCCCTAG TGATGGAGTT GGCCACTCCC
2201 TCTCTGCGCG CTCGCTCGCT CACTGAGGCC GGGCGACCAA AGGTCGCCCG
2251 ACGCCCGGGC TTTGCCCGGG CGGCCTCAGT GAGCGAGCGA GCGCGCAGCT
2301 GCCTGCAGGG GCGCCTGATG CGGTATTTTC TCCTTACGCA TCTGTGCGGT
2351 ATTTCACACC GCATACGTCA AAGCAACCAT AGTACGCGCC CTGTAGCGGC
2401 GCATTAAGCG CGGCGGGTGT GGTGGTTACG CGCAGCGTGA CCGCTACACT
2451 TGCCAGCGCC CTAGCGCCCG CTCCTTTCGC TTTCTTCCCT TCCTTTCTCG
2501 CCACGTTCGC CGGCTTTCCC CGTCAAGCTC TAAATCGGGG GCTCCCTTTA
2551 GGGTTCCGAT TTAGTGCTTT ACGGCACCTC GACCCCAAAA AACTTGATTT
2601 GGGTGATGGT TCACGTAGTG GGCCATCGCC CTGATAGACG GTTTTTCGCC
2651 CTTTGACGTT GGAGTCCACG TTCTTTAATA GTGGACTCTT GTTCCAAACT
2701 GGAACAACAC TCAACCCTAT CTCGGGCTAT TCTTTTGATT TATAAGGGAT
2751 TTTGCCGATT TCGGCCTATT GGTTAAAAAA TGAGCTGATT TAACAAAAAT
2801 TTAACGCGAA TTTTAACAAA ATATTAACGT TTACAATTTT ATGGTGCACT
2851 CTCAGTACAA TCTGCTCTGA TGCCGCATAG TTAAGCCAGC CCCGACACCC
2901 GCCAACACCC GCTGACGCGC CCTGACGGGC TTGTCTGCTC CCGGCATCCG
2951 CTTACAGACA AGCTGTGACC GTCTCCGGGA GCTGCATGTG TCAGAGGTTT
3001 TCACCGTCAT CACCGAAACG CGCGAGACGA AAGGGCCTCG TGATACGCCT
3051 ATTTTTATAG GTTAATGTCA TGATAATAAT GGTTTCTTAG ACGTCAGGTG
3101 GCACTTTTCG GGGAAATGTG CGCGGAACCC CTATTTGTTT ATTTTTCTAA
3151 ATACATTCAA ATATGTATCC GCTCATGAGA CAATAACCCT GATAAATGCT
3201 TCAATAATAT TGAAAAAGGA AGAGTATGAG TATTCAACAT TTCCGTGTCG
3251 CCCTTATTCC CTTTTTTGGG GCATTTTGCC TTCCTGTTTT TGCTCACCCA
3301 GAAACGCTGG TGAAAGTAAA AGATGCTGAA GATCAGTTGG GTGCACGAGT
3351 GGGTTACATC GAACTGGATC TCAACAGCGG TAAGATCCTT GAGAGTTTTC
3401 GCCCCGAAGA ACGTTTTCCA ATGATGAGCA CTTTTAAAGT TCTGCTATGT
3451 GGCGCGGTAT TATCCCGTAT TGACGCCGGG CAAGAGCAAC TCGGTCGCCG
3501 CATACACTAT TCTCAGAATG ACTTGGTTGA GTACTCACCA GTCACAGAAA
3551 AGCATCTTAC GGATGGCATG ACAGTAAGAG AATTATGCAG TGCTGCCATA
3601 ACCATGAGTG ATAACACTGC GGCCAACTTA CTTCTGACAA CGATCGGAGG
3651 ACCGAAGGAG CTAACCGCTT TTTTGCACAA CATGGGGGAT CATGTAACTC
3701 GCCTTGATCG TTGGGAACCG GAGCTGAATG AAGCCATACC AAACGACGAG
3751 CGTGACACCA CGATGCCTGT AGCAATGGCA ACAACGTTGC GCAAACTATT
3801 AACTGGCGAA CTACTTACTC TAGCTTCCCG GCAACAATTA ATAGACTGGA
3851 TGGAGGCGGA TAAAGTTGCA GGACCACTTC TGCGCTCGGC CCTTCCGGCT
3901 GGCTGGTTTA TTGCTGATAA ATCTGGAGCC GGTGAGCGTG GGTCTCGCGG
3951 TATCATTGCA GCACTGGGGC CAGATGGTAA GCCCTCCCGT ATCGTAGTTA
4001 TCTACACGAC GGGGAGTCAG GCAACTATGG ATGAACGAAA TAGACAGATC
4051 GCTGAGATAG GTGCCTCACT GATTAAGCAT TGGTAACTGT CAGACCAAGT
4101 TTACTCATAT ATACTTTAGA TTGATTTAAA ACTTCATTTT TAATTTAAAA
4151 GGATCTAGGT GAAGATCCTT TTTGATAATC TCATGACCAA AATCCCTTAA
4201 CGTGAGTTTT CGTTCCACTG AGCGTCAGAC CCCGTAGAAA AGATCAAAGG
4251 ATCTTCTTGA GATCCTTTTT TTCTGCGCGT AATCTGCTGC TTGCAAACAA
4301 AAAAACCACC GCTACCAGCG GTGGTTTGTT TGCCGGATCA AGAGCTACCA
4351 ACTCTTTTTC CGAAGGTAAC TGGCTTCAGC AGAGCGCAGA TACCAAATAC
4401 TGTCCTTCTA GTGTAGCCGT AGTTAGGCCA CCACTTCAAG AACTCTGTAG
4451 CACCGCCTAC ATACCTCGCT CTGCTAATCC TGTTACCAGT GGCTGCTGCC
4501 AGTGGCGATA AGTCGTGTCT TACCGGGTTG GACTCAAGAC GATAGTTACC
4551 GGATAAGGCG CAGCGGTCGG GCTGAACGGG GGGTTCGTGC ACACAGCCCA
4601 GCTTGGAGCG AACGACCTAC ACCGAACTGA GATACCTACA GCGTGAGCTA
4651 TGAGAAAGCG CCACGCTTCC CGAAGGGAGA AAGGCGGACA GGTATCCGGT
4701 AAGCGGCAGG GTCGGAACAG GAGAGCGCAC GAGGGAGCTT CCAGGGGGAA
4751 ACGCCTGGTA TCTTTATAGT CCTGTCGGGT TTCGCCACCT CTGACTTGAG
4801 CGTCGATTTT TGTGATGCTC GTCAGGGGGG CGGAGCCTAT GGAAAAACGC
4851 CAGCAACGCG GCCTTTTTAC GGTTCCTGGC CTTTTGCTGG CCTTTTGCTC
4901 ACATGT
AAVC-CBh- mBPIP-TATκ28-NLS-eGFP
L-ITR: 1-141
CBh promoter: 159-976
BIp-TATκ28-NLS-eGFP: 1000-1965
bGHp(A): 1990-2217
R-ITR: 2229-2369
Amp(R): 3286-4143
pUC origin: 4294-4961
SEQ ID NO: 113
      1 CCTGCAGGCA GCTGCGCGCT CGCTCGCTCA CTGAGGCCGC CCGGGCAAAG
    51 CCCGGGCGTC GGGCGACCTT TGGTCGCCCG GCCTCAGTGA GCGAGCGAGC
  101 GCGCAGAGAG GGAGTGGCCA ACTCCATCAC TAGGGGTTCC TGCGGCCTAA
  151 GGCAATTGTT AATAGTAATC AATTACGGGG TCATTAGTTC ATAGGCCATA
  201 TATGGAGTTC CGCGTTACAT AACTTACGGT AAATGGCCCG CCTGGCTGAC
  251 CGCCCAACGA CCCCCGCCCA TTGACGTCAA TAATGACGTA TGTTCCCATA
  301 GTAACGCCAA TAGGGACTTT CCATTGACGT CAATGGGTGG AGTATTTACG
  351 GTAAACTGCC CACTTGGCAG TACATCAAGT GTATCATATG CCAAGTACGC
  401 CCCCTATTGA CGTCAATGAC GGTAAATGGC CCGCCTGGCA TTATGCCCAG
  451 TACATGACCT TACGGGACTT TCCTACTTGG CAGTACATCT CCACGTTCTG
  501 CTTCACTCTC CCCATCTCCC CCCCCTCCCC ACCCCCAATT TTGTATTTAT
  551 TTATTTTTTA ATTATTTTGT GCAGCGATGG GGGCGGGGGG GGGGGGGGCG
  601 CGCGCCAGGC GGGGCGGGGC GGGGCGAGGG GCGGGGCGGG GCGAGGCGGA
  651 GAGGTGCGGC GGCAGCCAAT CAGAGCGGCG CGCTCCGAAA GTTTCCTTTT
  701 ATGGCGAGGC GGCGGCGGCG GCGGCCCTAT AAAAAGCGAA GCGCGCGGCG
  751 GGGAGTCGCT GCGTTGCCTT CGCCCCGTGC CCCGCTCCGC GCCGCCTCGC
  801 GCCGCCCGCC CCGGCTCTGA CTGACCGCGT TACTCCCACA GGTGAGCGGG
  851 CGGGACGGCC CTTCTCCTCC GGGCTGTAAT TAGCAAGAGG TAAGGGTTTA
  901 AGGGATGGTT GGTTGGTGGG GTATTAATGT TTAATTACCT GTTTTACAGG
  951 CCTGAAATCA CTTGGTTTTA GGTTGGGCTA GCCAAAGCTT GCCGCCACCA
1001 TGAAACTCAG TCTGGTCGCC GCTATGCTCC TGCTCCTCTC CCTGGTCGCC
1051 GCTATGCTCC TGCTCCTGTC TGCTGCCCGC GCTGGGGACG CTGCTCAGCC
1101 AGCTAGGAGA GCTAGGAGGA CCAAGCTGGC TGCTTACGCT AGAAAGGCTG
1151 CTAGGCAGGC TAGAGCTGGA GGAGGAGGAT CCATGGCTCC CAAGAAGAAG
1201 AGGAAGGTGC GCTACCCCGC CTTCCTGTAC AAGGTGGCTA CCATGGTGTC
1251 TAAGGGAGAG GAGCTGTTTA CAGGCGTGGT GCCCATCCTG GTGGAGCTGG
1301 ACGGAGATGT GAACGGCCAC AAGTTCAGCG TGTCCGGAGA GGGAGAGGGC
1351 GACGCCACCT ACGGAAAGCT GACACTGAAG TTTATCTGCA CCACAGGCAA
1401 GCTGCCCGTG CCTTGGCCAA CCCTGGTGAC CACACTGACA TACGGCGTGC
1451 AGTGTTTCTC TCGGTACCCT GACCACATGA AGCAGCACGA TTTCTTTAAG
1501 AGCGCCATGC CAGAGGGATA CGTGCAGGAG AGGACAATCT TCTTTAAGGA
1551 CGATGGCAAC TACAAGACCA GAGCTGAGGT GAAGTTCGAG GGAGACACAC
1601 TGGTGAACCG GATCGAGCTG AAGGGCATCG ACTTTAAGGA GGATGGAAAC
1651 ATCCTGGGCC ACAAGCTGGA GTACAACTAC AACAGCCACA ACGTGTACAT
1701 CATGGCCGAT AAGCAGAAGA ACGGAATCAA GGTGAACTTT AAGATCCGCC
1751 ACAACATCGA GGACGGCTCC GTGGAGCTGG CTGATCACTA CCAGCAGAAC
1801 ACCCCAATCG GAGACGGACC CGTGCTGCTG CCTGATAACC ACTACCTGTC
1851 TACACAGAGC GCCCTGTCCA AGGACCCTAA CGAGAAGAGG GATCACATGG
1901 TCCTCCTGGA ATTTGTGACT GCTGCTGGGA TTACTCTCGG TATGGATGAA
1951 CTGTATAAAT GATAAGCGGC CGCAACTCGA GACTCTAGAC GACTGTGCCT
2001 TCTAGTTGCC AGCCATCTGT TGTTTGCCCC TCCCCCGTGC CTTCCTTGAC
2051 CCTGGAAGGT GCCACTCCCA CTGTCCTTTC CTAATAAAAT GAGGAAATTG
2101 CATCGCATTG TCTGAGTAGG TGTCATTCTA TTCTGGGGGG TGGGGTGGGG
2151 CAGGACAGCA AGGGGGAGGA TTGGGAAGAC AATAGCAGGC ATGCTGGGGA
2201 TGCGGTGGGC TCTATGGCCG CGGGCCGCAG GAACCCCTAG TGATGGAGTT
2251 GGCCACTCCC TCTCTGCGCG CTCGCTCGCT CACTGAGGCC GGGCGACCAA
2301 AGGTCGCCCG ACGCCCGGGC TTTGCCCGGG CGGCCTCAGT GAGCGAGCGA
2351 GCGCGCAGCT GCCTGCAGGG GCGCCTGATG CGGTATTTTC TCCTTACGCA
2401 TCTGTGCGGT ATTTCACACC GCATACGTCA AAGCAACCAT AGTACGCGCC
2451 CTGTAGCGGC GCATTAAGCG CGGCGGGTGT GGTGGTTACG CGCAGCGTGA
2501 CCGCTACACT TGCCAGCGCC CTAGCGCCCG CTCCTTTCGC TTTCTTCCCT
2551 TCCTTTCTCG CCACGTTCGC CGGCTTTCCC CGTCAAGCTC TAAATCGGGG
2601 GCTCCCTTTA GGGTTCCGAT TTAGTGCTTT ACGGCACCTC GACCCCAAAA
2651 AACTTGATTT GGGTGATGGT TCACGTAGTG GGCCATCGCC CTGATAGACG
2701 GTTTTTCGCC CTTTGACGTT GGAGTCCACG TTCTTTAATA GTGGACTCTT
2751 GTTCCAAACT GGAACAACAC TCAACCCTAT CTCGGGCTAT TCTTTTGATT
2801 TATAAGGGAT TTTGCCGATT TCGGCCTATT GGTTAAAAAA TGAGCTGATT
2851 TAACAAAAAT TTAACGCGAA TTTTAACAAA ATATTAACGT TTACAATTTT
2901 ATGGTGCACT CTCAGTACAA TCTGCTCTGA TGCCGCATAG TTAAGCCAGC
2951 CCCGACACCC GCCAACACCC GCTGACGCGC CCTGACGGGC TTGTCTGCTC
3001 CCGGCATCCG CTTACAGACA AGCTGTGACC GTCTCCGGGA GCTGCATGTG
3051 TCAGAGGTTT TCACCGTCAT CACCGAAACG CGCGAGACGA AAGGGCCTCG
3101 TGATACGCCT ATTTTTATAG GTTAATGTCA TGATAATAAT GGTTTCTTAG
3151 ACGTCAGGTG GCACTTTTCG GGGAAATGTG CGCGGAACCC CTATTTGTTT
3201 ATTTTTCTAA ATACATTCAA ATATGTATCC GCTCATGAGA CAATAACCCT
3251 GATAAATGCT TCAATAATAT TGAAAAAGGA AGAGTATGAG TATTCAACAT
3301 TTCCGTGTCG CCCTTATTCC CTTTTTTGCG GCATTTTGCC TTCCTGTTTT
3351 TGCTCACCCA GAAACGCTGG TGAAAGTAAA AGATGCTGAA GATCAGTTGG
3401 GTGCACGAGT GGGTTACATC GAACTGGATC TCAACAGCGG TAAGATCCTT
3451 GAGAGTTTTC GCCCCGAAGA ACGTTTTCCA ATGATGAGCA CTTTTAAAGT
3501 TCTGCTATGT GGCGCGGTAT TATCCCGTAT TGACGCCGGG CAAGAGCAAC
3551 TCGGTCGCCG CATACACTAT TCTCAGAATG ACTTGGTTGA GTACTCACCA
3601 GTCACAGAAA AGCATCTTAC GGATGGCATG ACAGTAAGAG AATTATGCAG
3651 TGCTGCCATA ACCATGAGTG ATAACACTGC GGCCAACTTA CTTCTGACAA
3701 CGATCGGAGG ACCGAAGGAG CTAACCGCTT TTTTGCACAA CATGGGGGAT
3751 CATGTAACTC GCCTTGATCG TTGGGAACCG GAGCTGAATG AAGCCATACC
3801 AAACGACGAG CGTGACACCA CGATGCCTGT AGCAATGGCA ACAACGTTGC
3851 GCAAACTATT AACTGGCGAA CTACTTACTC TAGCTTCCCG GCAACAATTA
3901 ATAGACTGGA TGGAGGCGGA TAAAGTTGCA GGACCACTTC TGCGCTCGGC
3951 CCTTCCGGCT GGCTGGTTTA TTGCTGATAA ATCTGGAGCC GGTGAGCGTG
4001 GGTCTCGCGG TATCATTGCA GCACTGGGGC CAGATGGTAA GCCCTCCCGT
4051 ATCGTAGTTA TCTACACGAC GGGGAGTCAG GCAACTATGG ATGAACGAAA
4101 TAGACAGATC GCTGAGATAG GTGCCTCACT GATTAAGCAT TGGTAACTGT
4151 CAGACCAAGT TTACTCATAT ATACTTTAGA TTGATTTAAA ACTTCATTTT
4201 TAATTTAAAA GGATCTAGGT GAAGATCCTT TTTGATAATC TCATGACCAA
4251 AATCCCTTAA CGTGAGTTTT CGTTCCACTG AGCGTCAGAC CCCGTAGAAA
4301 AGATCAAAGG ATCTTCTTGA GATCCTTTTT TTCTGCGCGT AATCTGCTGC
4351 TTGCAAACAA AAAAACCACC GCTACCAGCG GTGGTTTGTT TGCCGGATCA
4401 AGAGCTACCA ACTCTTTTTC CGAAGGTAAC TGGCTTCAGC AGAGCGCAGA
4451 TACCAAATAC TGTCCTTCTA GTGTAGCCGT AGTTAGGCCA CCACTTCAAG
4501 AACTCTGTAG CACCGCCTAC ATACCTCGCT CTGCTAATCC TGTTACCAGT
4551 GGCTGCTGCC AGTGGCGATA AGTCGTGTCT TACCGGGTTG GACTCAAGAC
4601 GATAGTTACC GGATAAGGCG CAGCGGTCGG GCTGAACGGG GGGTTCGTGC
4651 ACACAGCCCA GCTTGGAGCG AACGACCTAC ACCGAACTGA GATACCTACA
4701 GCGTGAGCTA TGAGAAAGCG CCACGCTTCC CGAAGGGAGA AAGGCGGACA
4751 GGTATCCGGT AAGCGGCAGG GTCGGAACAG GAGAGCGCAC GAGGGAGCTT
4801 CCAGGGGGAA ACGCCTGGTA TCTTTATAGT CCTGTCGGGT TTCGCCACCT
4851 CTGAOTTGAG CGTCGATTTT TGTGATGCTC GTCAGGGGGG CGGAGCCTAT
4901 GGAAAAACGC CAGCAACGCG GCCTTTTTAC GGTTCCTGGC CTTTTGCTGG
4951 CCTTTTGCTC ACATGT
AAVC-Syn-hCDKL5-107
L-ITR: 1-141
Syn-1 promoter: 159-730
hCDKL5-107 ORF: 754-3639
bGHp(A): 3664-3891
R-ITR: 3903-4043
Amp(R): 4960-5817
pUC origin: 5968-6635
SEQ ID NO: 114
      1 CCTGCAGGCA GCTGCGCGCT CGCTCGCTCA CTGAGGCCGC CCGGGCAAAG
    51 CCCGGGCGTC GGGCGACCTT TGGTCGCCCG GCCTCAGTGA GCGAGCGAGC
  101 GCGCAGAGAG GGAGTGGCCA ACTCCATCAC TAGGGGTTCC TGCGGCCTAA
  151 GGCAATTGAC TACAAACCGA GTATCTGCAG AGGGCCCTGC GTATGAGTGC
  201 AAGTGGGTTT TAGGACCAGG ATGAGGCGGG GTGGGGGTGC CTACCTGACG
  251 ACCGACCCCG ACCCACTGGA CAAGCACCCA ACCCCCATTC CCCAAATTGC
  301 GCATCCCCTA TCAGAGAGGG GGAGGGGAAA CAGGATGCGG CGAGGCGCGT
  351 GCGCACTGCC AGCTTCAGCA CCGCGGACAG TGCCTTCGCC CCCGCCTGGC
  401 GGCGCGCGCC ACCGCCGCCT CAGCACTGAA GGCGCGCTGA CGTCACTCGC
  451 CGGTCCCCCG CAAACTCCCC TTCCCGGCCA CCTTGGTCGC GTCCGCGCCG
  501 CCGCCGGCCC AGCCGGACCG CACCACGCGA GGCGCGAGAT AGGGGGGCAC
  551 GGGCGCGACC ATCTGCGCTG CGGCGCCGGC GACTCAGCGC TGCCTCAGTC
  601 TGCGGTGGGC AGCGGAGGAG TCGTGTCGTG CCTGAGAGCG CAGCTGTGCT
  651 CCTGGGCACC GCGCAGTCCG CCCCCGCGGC TCCTGGCCAG ACCACCCCTA
  701 GGACCCCCTG CCCCAAGTCG CAGCCTTCGA GCTAGCCAAA GCTTGCCGCC
  751 ACCATGAAAA TCCCTAACAT TGGTAACGTG ATGAACAAGT TTGAAATCCT
  801 CGGGGTCGTC GGAGAAGGTG CCTACGGGGT CGTGCTGAAG TGCAGACACA
  851 AGGAGACACA CGAGATCGTG GCCATCAAGA AGTTCAAGGA TAGCGAGGAG
  901 AACGAGGAGG TGAAGGAGAC AACCCTGAGA GAGCTGAAGA TGCTGCGGAC
  951 ACTGAAGCAG GAGAACATCG TGGAGCTGAA GGAGGCTTTC AGGAGACGGG
1001 GAAAGCTGTA CCTGGTGTTT GAGTACGTGG AGAAGAACAT GCTGGAGCTG
1051 CTGGAGGAGA TGCCTAACGG CGTGCCCCCT GAGAAGGTGA AGTCCTACAT
1101 CTACCAGCTG ATCAAGGCCA TCCACTGGTG CCACAAGAAC GACATCGTGC
1151 ACAGAGATAT CAAGCCAGAG AACCTGCTGA TCTCCCACAA CGACGTGCTG
1201 AAGCTGTGCG ATTTCGGCTT TGCCCGGAAC CTGAGCGAGG GAAACAACGC
1251 CAACTACACA GAGTACGTGG CTACCAGATG GTACCGGAGC CCAGAGCTGC
1301 TGCTGGGAGC TCCATACGGA AAGAGCGTGG ACATGTGGTC CGTGGGCTGC
1351 ATCCTGGGAG AGCTGTCTGA CGGCCAGCCT CTGTTCCCAG GAGAGAGCGA
1401 GATCGATCAG CTGTTTACCA TCCAGAAGGT GCTGGGCCCT CTGCCAAGCG
1451 AGCAGATGAA GCTGTTCTAC TCCAACCCTA GATTCCACGG ACTGCGGTTT
1501 CCCGCCGTGA ACCACCCTCA GAGCCTGGAG CGCAGGTACC TGGGCATCCT
1551 GAACTCCGTG CTGCTGGATC TGATGAAGAA CCTGCTGAAG CTGGACCCCG
1601 CCGATAGATA CCTGACCGAG CAGTGTCTGA ACCACCCTAC ATTTCAGACC
1651 CAGCGCCTGC TGGACAGGAG CCCTTCCAGA TCTGCTAAGC GGAAGCCATA
1701 CCACGTGGAG AGCTCCACCC TGTCCAACAG AAACCAGGCC GGCAAGTCTA
1751 CAGCTCTGCA GAGCCACCAC CGGAGCAACT CCAAGGACAT CCAGAACCTG
1801 TCTGTGGGCC TGCCTAGGGC TGATGAGGGA CTGCCAGCTA ACGAGAGCTT
1851 CCTGAACGGC AACCTGGCCG GAGCTTCTCT GAGCCCACTG CACACAAAGA
1901 CCTACCAGGC CTCTAGCCAG CCCGGCTCCA CATCTAAGGA CCTGACCAAC
1951 AACAACATCC CACACCTGCT GTCTCCCAAG GAGGCTAAGA GCAAGACCGA
2001 GTTCGACTTT AACATCGATC CCAAGCCTAG CGAGGGCCCA GGAACAAAGT
2051 ACCTGAAGAG CAACTCCCGC TCTCAGCAGA ACAGGCACTC CTTCATGGAG
2101 TCCTCTCAGT CTAAGGCCGG CACCCTGCAG CCCAACGAGA AGCAGAGCAG
2151 GCACTCCTAC ATCGATACCA TCCCCCAGAG CTCCAGAAGC CCTTCCTACC
2201 GGACAAAGGC CAAGAGCCAC GGCGCTCTGT CTGACAGCAA GTCCGTGTCT
2251 AACCTGTCCG AGGCTAGGGC TCAGATCGCT GAGCCAAGCA CCTCCAGGTA
2301 CTTTCCTTCT AGCTGTCTGG ACCTGAACTC TCCTACAAGC CCAACACCCA
2351 CCCGCCACTC CGATACAAGG ACCCTGCTGT CTCCAAGCGG CAGGAACAAC
2401 AGGAACGAGG GAACCCTGGA TTCTAGACGG ACCACAACCC GCCACAGCAA
2451 GACAATGGAG GAGCTGAAGC TGCCAGAGCA CATGGACTCC TCTCACTCCC
2501 ACTCTCTGAG CGCCCCCCAC GAGTCCTTCT CTTACGGCCT GGGATACACC
2551 TCCCCCTTCA GCTCCCAGCA GAGGCCCCAC AGGCACTCTA TGTACGTGAC
2601 ACGCGACAAG GTGAGGGCCA AGGGCCTGGA TGGAAGCCTG TCCATCGGAC
2651 AGGGAATGGC TGCTAGGGCT AACTCCCTGC AGCTGCTGTC TCCTCAGCCA
2701 GGAGAGCAGC TGCCACCAGA GATGACCGTG GCTCGCTCTA GCGTGAAGGA
2751 GACAAGCAGG GAGGGCACCT CCTCTTTCCA CACACGCCAG AAGTCCGAGG
2801 GCGGAGTGTA CCACGACCCC CACTCTGACG ATGGAACAGC TCCTAAGGAG
2851 AACAGGCACC TGTACAACGA TCCCGTGCCT CGCAGGGTGG GCTCCTTCTA
2901 CAGAGTGCCA TCTCCCCGGC CTGACAACAG CTTTCACGAG AACAACGTGT
2951 CCACCCGCGT GAGCTCCCTG CCTTCTGAGT CTAGCTCCGG AACAAACCAC
3001 TCTAAGAGGC AGCCCGCCTT TGACCCTTGG AAGAGCCCAG AGAACATCTC
3051 TCACAGCGAG CAGCTGAAGG AGAAGGAGAA GCAGGGCTTC TTTCGCAGCA
3101 TGAAGAAGAA GAAGAAGAAG AGCCAGACCG TGCCTAACTC CGACTCTCCA
3151 GATCTGCTGA CCCTGCAGAA GTCCATCCAC AGCGCCTCCA CACCATCTAG
3201 CCGCCCTAAG GAGTGGAGGC CTGAGAAGAT CAGCGATCTG CAGACACAGA
3251 GCCAGCCACT GAAGTCCCTG AGGAAGCTGC TGCACCTGTC CTCTGCCAGC
3301 AACCACCCCG CTAGCTCCGA CCCAAGATTC CAGCCCCTGA CAGCCCAGCA
3351 GACCAAGAAC TCTTTTAGCG AGATCCGGAT CCACCCTCTG TCCCAGGCTT
3401 CTGGCGGATC TAGCAACATC AGACAGGAGC CAGCTCCAAA GGGCCGGCCC
3451 GCTCTGCAGC TGCCTGGCCA GATGGACCCA GGATGGCACG TGTCCTCTGT
3501 GACAAGATCC GCCACCGAGG GACCATCCTA CTCTGAGCAG CTGGGCGCTA
3551 AGTCTGGCCC TAACGGACAC CCATACAATA GGACTAATAG AAGCAGAATG
3601 CCAAACCTCA ATGACCTCAA GGAAACAGCA CTCTGATAAG CGGCCGCAAC
3651 TCGAGACTCT AGACGACTGT GCCTTCTAGT TGCCAGCCAT CTGTTGTTTG
3701 CCCCTCCCCC GTGCCTTCCT TGACCCTGGA AGGTGCCACT CCCACTGTCC
3751 TTTCCTAATA AAATGAGGAA ATTGCATCGC ATTGTCTGAG TAGGTGTCAT
3801 TCTATTCTGG GGGGTGGGGT GGGGCAGGAC AGCAAGGGGG AGGATTGGGA
3851 AGACAATAGC AGGCATGCTG GGGATGCGGT GGGCTCTATG GCCGCGGGCC
3901 GCAGGAACCC CTAGTGATGG AGTTGGCCAC TCCCTCTCTG CGCGCTCGCT
3951 CGCTCACTGA GGCCGGGCGA CCAAAGGTCG CCCGACGCCC GGGCTTTGCC
4001 CGGGCGGCCT CAGTGAGCGA GCGAGCGCGC AGCTGCCTGC AGGGGCGGCT
4051 GATGCGGTAT TTTCTCCTTA CGCATCTGTG CGGTATTTCA CACCGCATAC
4101 GTCAAAGCAA CCATAGTACG CGCCCTGTAG CGGCGCATTA AGCGCGGCGG
4151 GTGTGGTGGT TACGCGCAGC GTGACCGCTA CACTTGCCAG CGCCCTAGCG
4201 CCCGCTCCTT TCGCTTTCTT CCCTTCCTTT CTCGCCACGT TCGCCGGCTT
4251 TCCCCGTCAA GCTCTAAATC GGGGGCTCCC TTTAGGGTTC CGATTTAGTG
4301 CTTTACGGCA CCTCGACCCC AAAAAACTTG ATTTGGGTGA TGGTTCACGT
4351 AGTGGGCCAT CGCCCTGATA GACGGTTTTT CGCCCTTTGA CGTTGGAGTC
4401 CACGTTCTTT AATAGTGGAC TCTTGTTCCA AACTGGAACA ACACTCAACC
4451 CTATCTCGGG CTATTCTTTT GATTTATAAG GGATTTTGCC GATTTCGGCC
4501 TATTGGTTAA AAAATGAGCT GATTTAACAA AAATTTAACG CGAATTTTAA
4551 CAAAATATTA ACGTTTACAA TTTTATGGTG CACTCTCAGT ACAATCTGCT
4601 CTGATGCCGC ATAGTTAAGC CAGCCCCGAC ACCCGCCAAC ACCCGCTGAC
4651 GCGCCCTGAC GGGCTTGTCT GCTCCCGGCA TCCGCTTACA GACAAGCTGT
4701 GACCGTCTCC GGGAGCTGCA TGTGTCAGAG GTTTTCACCG TCATCACCGA
4751 AACGCGCGAG ACGAAAGGGC CTCGTGATAC GCCTATTTTT ATAGGTTAAT
4801 GTCATGATAA TAATGGTTTC TTAGACGTCA GGTGGCACTT TTCGGGGAAA
4851 TGTGCGCGGA ACCCCTATTT GTTTATTTTT CTAAATACAT TCAAATATGT
4901 ATCCGCTCAT GAGACAATAA CCCTGATAAA TGCTTCAATA ATATTGAAAA
4951 AGGAAGAGTA TGAGTATTCA ACATTTCCGT GTCGCCCTTA TTCCCTTTTT
5001 TGCGGCATTT TGCCTTCCTG TTTTTGCTCA CCCAGAAACG CTGGTGAAAG
5051 TAAAAGATGC TGAAGATCAG TTGGGTGCAC GAGTGGGTTA CATCGAACTG
5101 GATCTCAACA GCGGTAAGAT CCTTGAGAGT TTTCGCCCCG AAGAACGTTT
5151 TCCAATGATG AGCACTTTTA AAGTTCTGCT ATGTGGCGCG GTATTATCCC
5201 GTATTGACGC CGGGCAAGAG CAACTCGGTC GCCGCATACA CTATTCTCAG
5251 AATGACTTGG TTGAGTACTC ACCAGTCACA GAAAAGCATC TTACGGATGG
5301 CATGACAGTA AGAGAATTAT GCAGTGCTGC CATAACCATG AGTGATAACA
5351 CTGCGGCCAA CTTACTTCTG ACAACGATCG GAGGACCGAA GGAGCTAACC
5401 GCTTTTTTGC ACAACATGGG GGATCATGTA ACTCGCCTTG ATCGTTGGGA
5451 ACCGGAGCTG AATGAAGCCA TACCAAACGA CGAGCGTGAC ACCACGATGC
5501 CTGTAGCAAT GGCAACAACG TTGCGCAAAC TATTAACTGG CGAACTACTT
5551 ACTCTAGCTT CCCGGCAACA ATTAATAGAC TGGATGGAGG CGGATAAAGT
5601 TGCAGGACCA CTTCTGCGCT CGGCCCTTCC GGCTGGCTGG TTTATTGCTG
5651 ATAAATCTGG AGCCGGTGAG CGTGGGTCTC GCGGTATCAT TGCAGCACTG
5701 GGGCCAGATG GTAAGCCCTC CCGTATCGTA GTTATCTACA CGACGGGGAG
5751 TCAGGCAACT ATGGATGAAC GAAATAGACA GATCGCTGAG ATAGGTGCCT
5801 CACTGATTAA GCATTGGTAA CTGTCAGACC AAGTTTACTC ATATATACTT
5851 TAGATTGATT TAAAACTTCA TTTTTAATTT AAAAGGATCT AGGTGAAGAT
5901 CCTTTTTGAT AATCTCATGA CCAAAATCCC TTAACGTGAG TTTTCGTTCC
5951 ACTGAGCGTC AGACCCCGTA GAAAAGATCA AAGGATCTTC TTGAGATCCT
6001 TTTTTTCTGC GCGTAATCTG CTGCTTGCAA ACAAAAAAAC CACCGCTACC
6051 AGCGGTGGTT TGTTTGCCGG ATCAAGAGCT ACCAACTCTT TTTCCGAAGG
6101 TAACTGGCTT CAGCAGAGCG CAGATACCAA ATACTGTCCT TCTAGTGTAG
6151 CCGTAGTTAG GCCACCACTT CAAGAACTCT GTAGCACCGC CTACATACCT
6201 CGCTCTGCTA ATCCTGTTAC CAGTGGCTGC TGCCAGTGGC GATAAGTCGT
6251 GTCTTACCGG GTTGGACTCA AGACGATAGT TACCGGATAA GGCGCAGCGG
6301 TCGGGCTGAA CGGGGGGTTC GTGCACACAG CCCAGCTTGG AGCGAACGAC
6351 CTACACCGAA CTGAGATACC TACAGCGTGA GCTATGAGAA AGCGCCACGC
6401 TTCCCGAAGG GAGAAAGGCG GACAGGTATC CGGTAAGCGG CAGGGTCGGA
6451 ACAGGAGAGO GCACGAGGGA GCTTCCAGGG GGAAACGCCT GGTATCTTTA
6501 TAGTCCTGTC GGGTTTCGCC ACCTCTGACT TGAGCGTCGA TTTTTGTGAT
6551 GCTCGTCAGG GGGGCGGAGC CTATGGAAAA ACGCCAGCAA CGCGGCCTTT
6601 TTACGGTTCC TGGCCTTTTG CTGGCCTTTT GCTCACATGT
AAVC-Syn-hCDKL5-107(dead kinase)
L-ITR: 1-141
Syn-1 promoter: 159-730
hCDKL5-107 ORF (kinase dead): 754-3639
bGHp(A): 3664-3891
R-ITR: 3903-4043
Amp(R): 4960-5817
pUC origin: 5968-6635
SEQ ID NO: 115
      1 CCTGCAGGCA GCTGCGCGCT CGCTCGCTCA CTGAGGCCGC CCGGGCAAAG
    51 CCCGGGCGTC GGGCGACCTT TGGTCGCCCG GCCTCAGTGA GCGAGCGAGC
  101 GCGCAGAGAG GGAGTGGCCA ACTCCATCAC TAGGGGTTCC TGCGGCCTAA
  151 GGCAATTGAC TACAAACCGA GTATCTGCAG AGGGCCCTGC GTATGAGTGC
  201 AAGTGGGTTT TAGGACCAGG ATGAGGCGGG GTGGGGGTGC CTACCTGACG
  251 ACCGACCCCG ACCCACTGGA CAAGCACCCA ACCCCCATTC CCCAAATTGC
  301 GCATCCCCTA TCAGAGAGGG GGAGGGGAAA CAGGATGCGG CGAGGCGCGT
  351 GCGCACTGCC AGCTTCAGCA CCGCGGACAG TGCCTTCGCC CCCGCCTGGC
  401 GGCGCGCGCC ACCGCCGCCT CAGCACTGAA GGCGCGCTGA CGTCACTCGC
  451 CGGTCCCCCG CAAACTCCCC TTCCCGGCCA CCTTGGTCGC GTCCGCGCCG
  501 CCGCCGGCCC AGCCGGACCG CACCACGCGA GGCGCGAGAT AGGGGGGCAC
  551 GGGCGCGACC ATCTGCGCTG CGGCGCCGGC GACTCAGCGC TGCCTCAGTC
  601 TGCGGTGGGC AGCGGAGGAG TCGTGTCGTG CCTGAGAGCG CAGCTGTGCT
  651 CCTGGGCACC GCGCAGTCCG CCCCCGCGGC TCCTGGCCAG ACCACCCCTA
  701 GGACCCCCTG CCCCAAGTCG CAGCCTTCGA GCTAGCCAAA GCTTGCCGCC
  751 ACCATGAAAA TCCCTAATAT CGGAAATGTG ATGAATAAGT TTGAAATCCT
  801 CGGGGTCGTC GGAGAAGGTG CCTACGGGGT CGTCCTGAAA TGCAGACACA
  851 AGGAGACACA CGAGATCGTG GCCATCAGGA GATTCAAGGA TAGCGAGGAG
  901 AACGAGGAGG TGAAGGAGAC AACCCTGCGC GAGCTGAAGA TGCTGAGGAC
  951 ACTGAAGCAG GAGAACATCG TGGAGCTGAA GGAGGCTTTC CGGCGCAGGG
1001 GAAAGCTGTA CCTGGTGTTT GAGTACGTGG AGAAGAACAT GCTGGAGCTG
1051 CTGGAGGAGA TGCCTAACGG CGTGCCCCCT GAGAAGGTGA AGTCCTACAT
1101 CTACCAGCTG ATCAAGGCCA TCCACTGGTG CCACAAGAAC GACATCGTGC
1151 ACCGCGATAT CAAGCCAGAG AACCTGCTGA TCTCCCACAA CGACGTGCTG
1201 AAGCTGTGCG ATTTCGGCTT TGCCAGGAAC CTGAGCGAGG GAAACAACGC
1251 CAACTACACA GAGTACGTGG CTACCCGCTG GTACAGGAGC CCAGAGCTGC
1301 TGCTGGGAGC TCCATACGGA AAGAGCGTGG ACATGTGGTC CGTGGGCTGC
1351 ATCCTGGGAG AGCTGTCTGA CGGCCAGCCT CTGTTCCCAG GAGAGAGCGA
1401 GATCGATCAG CTGTTTACCA TCCAGAAGGT GCTGGGCCCT CTGCCAAGCG
1451 AGCAGATGAA GCTGTTCTAC TCCAACCCTC GCTTCCAGGG ACTGAGGTTT
1501 CCCGCCGTGA ACCACCCTCA GAGCCTGGAG AGACGGTACC TGGGCATCCT
1551 GAACTCCGTG CTGCTGGATC TGATGAAGAA CCTGCTGAAG CTGGACCCCG
1601 CCGATCGCTA CCTGACCGAG CAGTGTCTGA ACCACCCTAC ATTTCAGACC
1651 CAGAGACTGC TGGACCGGAG CCCTTCCCGC TCTGCTAAGA GGAAGCCATA
1701 CCACGTGGAG AGCTCCACCC TGTCCAACCG CAACCAGGCC GGCAAGTCTA
1751 CAGCTCTGCA GAGCCACCAC AGGAGCAACT CCAAGGACAT CCAGAACCTG
1801 TCTGTGGGCC TGCCTAGGGC TGATGAGGGA CTGCCAGCTA ACGAGAGCTT
1851 CCTGAACGGC AACCTGGCCG GAGCTTCTCT GAGCCCACTG CACACAAAGA
1901 CCTACCAGGC CTCTAGCCAG CCCGGCTCCA CATCTAAGGA CCTGACCAAC
1951 AACAACATCC CACACCTGCT GTCTCCCAAG GAGGCTAAGA GCAAGACCGA
2001 GTTCGACTTT AACATCGATC CCAAGCCTAG CGAGGGCCCA GGAACAAAGT
2051 ACCTGAAGAG CAACTCCAGA TCTCAGCAGA ACCGGCACTC CTTCATGGAG
2101 TCCTCTCAGT CTAAGGCCGG CACCCTGCAG CCCAACGAGA AGCAGAGCAG
2151 GCACTCCTAC ATCGATACCA TCCCCCAGAG CTCCCGCAGC CCTTCCTACA
2201 GGACAAAGGC CAAGAGCCAC GGCGCTCTGT CTGACAGCAA GTCCGTGTCT
2251 AACCTGTCCG AGGCCAGAGC TCAGATCGCT GAGCCCAGCA CCTCCCGGTA
2301 CTTTCCTTCT AGCTGTCTGG ACCTGAACTC TCCTACAAGC CCAACACCCA
2351 CCAGACACTC CGATACACGG ACCCTGCTGT CTCCAAGCGG CAGAAACAAC
2401 CGGAAGGAGG GAACCCTGGA TTCTCGCAGG ACCACAACCA GACACAGCAA
2451 GACAATGGAG GAGCTGAAGC TGCCAGAGCA CATGGACTCC TCTCACTCCC
2501 ACTCTCTGAG CGCCCCCCAC GAGTCCTTCT CTTACGGCCT GGGATACACC
2551 TCCCCCTTCA GCTCCCAGCA GCGCCCCCAC AGGCACTCTA TGTACGTGAC
2601 AAGAGACAAG GTGCGGGCCA AGGGCCTGGA TGGAAGCCTG TCCATCGGCC
2651 AGGGAATGGC CGCTAGGGCT AACTCCCTGC AGCTGCTGTC TCCTCAGCCA
2701 GGAGAGCAGC TGCCACCCGA GATGACCGTG GCCAGATCTA GCGTGAAGGA
2751 GACAAGCCGG GAGGGCACCT CCTCTTTCCA CACAAGACAG AAGTCCGAGG
2801 GCGGAGTGTA CCACGACCCC CACTCTGACG ATGGAACAGC TCCTAAGGAG
2851 AACCGGCACC TGTACAACGA TCCCGTGCCT AGACGGGTGG GCTCCTTCTA
2901 CCGCGTGCCA TCTCCCAGGC CTGACAACAG CTTTCACGAG AACAACGTGT
2951 CCACCAGAGT GAGCTCCCTG CCTTCTGAGT CTAGCTCCGG AACAAACCAC
3001 TCTAAGCGGC AGCCCGCCTT TGACCCTTGG AAGAGCCCAG AGAACATCTC
3051 TCACAGCGAG CAGCTGAAGG AGAAGGAGAA GCAGGGCTTC TTTAGAAGCA
3101 TGAAGAAGAA GAAGAAGAAG AGCCAGACCG TGCCTAACTC CGACTCTCCA
3151 GATCTGCTGA CCCTGCAGAA GTCCATCCAC AGCGCCTCCA CACCCTCTAG
3201 CAGACCTAAG GAGTGGCGGC CTGAGAAGAT CAGCGATCTG CAGACACAGA
3251 GCCAGCCACT GAAGTCCCTG CGGAAGCTGC TGCACCTGTC CTCTGCCAGC
3301 AACCACCCAG CTAGCTCCGA CCCAAGGTTC CAGCCACTGA CAGCTCAGCA
3351 GACCAAGAAC TCTTTTAGCG AGATCAGGAT CCACCCTCTG TCCCAGGCTT
3401 CTGGCGGATC TAGCAACATC AGGCAGGAGC CAGCTCCAAA GGGCAGGCCC
3451 GCTCTGCAGC TGCCTGGACA GATGGACCCA GGATGGCACG TGTCCTCTGT
3501 GACAAGATCC GCCACCGAGG GACCATCCTA CTCTGAGCAG CTGGGCGCTA
3551 AGTCTGGCCC TAACGGACAC CCATACAACA GAACAAACAG AAGCAGAATG
3601 CCCAACCTCA ATGACCTCAA AGAAACAGCA CTCTGATAAG CGGCCGCAAC
3651 TCGAGACTCT AGACGACTGT GCCTTCTAGT TGCCAGCCAT CTGTTGTTTG
3701 CCCCTCCCCC GTGCCTTCCT TGACCCTGGA AGGTGCCACT CCCACTGTCC
3751 TTTCCTAATA AAATGAGGAA ATTGCATCGC ATTGTCTGAG TAGGTGTCAT
3801 TCTATTCTGG GGGGTGGGGT GGGGCAGGAC AGCAAGGGGG AGGATTGGGA
3851 AGACAATAGC AGGCATGCTG GGGATGCGGT GGGCTCTATG GCCGCGGGCC
3901 GCAGGAACCC CTAGTGATGG AGTTGGCCAC TCCCTCTCTG CGCGCTCGCT
3951 CGCTCACTGA GGCCGGGCGA CCAAAGGTCG CCCGACGCCC GGGCTTTGCC
4001 CGGGCGGCCT CAGTGAGCGA GCGAGCGCGC AGCTGCCTGC AGGGGCGGCT
4051 GATGCGGTAT TTTCTCCTTA CGCATCTGTG CGGTATTTCA CACCGCATAC
4101 GTCAAAGCAA CCATAGTACG CGCCCTGTAG CGGCGCATTA AGCGCGGCGG
4151 GTGTGGTGGT TACGCGCAGC GTGACCGCTA CACTTGCCAG CGCCCTAGCG
4201 CCCGCTCCTT TCGCTTTCTT CCCTTCCTTT CTCGCCACGT TCGCCGGCTT
4251 TCCCCGTCAA GCTCTAAATC GGGGGCTCCC TTTAGGGTTC CGATTTAGTG
4301 CTTTACGGCA CCTCGACCCC AAAAAACTTG ATTTGGGTGA TGGTTCACGT
4351 AGTGGGCCAT CGCCCTGATA GACGGTTTTT CGCCCTTTGA CGTTGGAGTC
4401 CACGTTCTTT AATAGTGGAC TCTTGTTCCA AACTGGAACA ACACTCAACC
4451 CTATCTCGGG CTATTCTTTT GATTTATAAG GGATTTTGCC GATTTCGGCC
4501 TATTGGTTAA AAAATGAGCT GATTTAACAA AAATTTAACG CGAATTTTAA
4551 CAAAATATTA ACGTTTACAA TTTTATGGTG CACTCTCAGT ACAATCTGCT
4601 CTGATGCCGC ATAGTTAAGC CAGCCCCGAC ACCCGCCAAC ACCCGCTGAC
4651 GCGCCCTGAC GGGCTTGTCT GCTCCCGGCA TCCGCTTACA GACAAGCTGT
4701 GACCGTCTCC GGGAGCTGCA TGTGTCAGAG GTTTTCACCG TCATCACCGA
4751 AACGCGCGAG ACGAAAGGGC CTCGTGATAC GCCTATTTTT ATAGGTTAAT
4801 GTCATGATAA TAATGGTTTC TTAGACGTCA GGTGGCACTT TTCGGGGAAA
4851 TGTGCGCGGA ACCCCTATTT GTTTATTTTT CTAAATACAT TCAAATATGT
4901 ATCCGCTCAT GAGACAATAA CCCTGATAAA TGCTTCAATA ATATTGAAAA
4951 AGGAAGAGTA TGAGTATTCA ACATTTCCGT GTCGCCCTTA TTCCCTTTTT
5001 TGCGGCATTT TGCCTTCCTG TTTTTGCTCA CCCAGAAACG CTGGTGAAAG
5051 TAAAAGATGC TGAAGATCAG TTGGGTGCAC GAGTGGGTTA CATCGAACTG
5101 GATCTCAACA GCGGTAAGAT CCTTGAGAGT TTTCGCCCCG AAGAACGTTT
5151 TCCAATGATG AGCACTTTTA AAGTTCTGCT ATGTGGCGCG GTATTATCCC
5201 GTATTGACGC CGGGCAAGAG CAACTCGGTC GCCGCATACA CTATTCTCAG
5251 AATGACTTGG TTGAGTACTC ACCAGTCACA GAAAAGCATC TTACGGATGG
5301 CATGACAGTA AGAGAATTAT GCAGTGCTGC CATAACCATG AGTGATAACA
5351 CTGCGGCCAA CTTACTTCTG ACAACGATCG GAGGACCGAA GGAGCTAACC
5401 GCTTTTTTGC ACAACATGGG GGATCATGTA ACTCGCCTTG ATCGTTGGGA
5451 ACCGGAGCTG AATGAAGCCA TACCAAACGA CGAGCGTGAC ACCACGATGC
5501 CTGTAGCAAT GGCAACAACG TTGCGCAAAC TATTAACTGG CGAACTACTT
5551 ACTCTAGCTT CCCGGCAACA ATTAATAGAC TGGATGGAGG CGGATAAAGT
5601 TGCAGGACCA CTTCTGCGCT CGGCCCTTCC GGCTGGCTGG TTTATTGCTG
5651 ATAAATCTGG AGCCGGTGAG CGTGGGTCTC GCGGTATCAT TGCAGCACTG
5701 GGGCCAGATG GTAAGCCCTC CCGTATCGTA GTTATCTACA CGACGGGGAG
5751 TCAGGCAACT ATGGATGAAC GAAATAGACA GATCGCTGAG ATAGGTGCCT
5801 CACTGATTAA GCATTGGTAA CTGTCAGACC AAGTTTACTC ATATATACTT
5851 TAGATTGATT TAAAACTTCA TTTTTAATTT AAAAGGATCT AGGTGAAGAT
5901 CCTTTTTGAT AATCTCATGA CCAAAATCCC TTAACGTGAG TTTTCGTTCC
5951 ACTGAGCGTC AGACCCCGTA GAAAAGATCA AAGGATCTTC TTGAGATCCT
6001 TTTTTTCTGC GCGTAATCTG CTGCTTGCAA ACAAAAAAAC CACCGCTACC
6051 AGCGGTGGTT TGTTTGCCGG ATCAAGAGCT ACCAACTCTT TTTCCGAAGG
6101 TAACTGGCTT CAGCAGAGCG CAGATACCAA ATACTGTCCT TCTAGTGTAG
6151 CCGTAGTTAG GCCACCACTT CAAGAACTCT GTAGCACCGC CTACATACCT
6201 CGCTCTGCTA ATCCTGTTAC CAGTGGCTGC TGCCAGTGGC GATAAGTCGT
6251 GTCTTACCGG GTTGGACTCA AGACGATAGT TACCGGATAA GGCGCAGCGG
6301 TCGGGCTGAA CGGGGGGTTC GTGCACACAG CCCAGCTTGG AGCGAACGAC
6351 CTACACCGAA CTGAGATACC TACAGCGTGA GCTATGAGAA AGCGCCACGC
6401 TTCCCGAAGG GAGAAAGGCG GACAGGTATC CGGTAAGCGG CAGGGTCGGA
6451 ACAGGAGAGO GCACGAGGGA GCTTCCAGGG GGAAACGCCT GGTATCTTTA
6501 TAGTCCTGTC GGGTTTCGCC ACCTCTGACT TGAGCGTCGA TTTTTGTGAT
6551 GCTCGTCAGG GGGGCGGAGC CTATGGAAAA ACGCCAGCAA CGCGGCCTTT
6601 TTACGGTTCC TGGCCTTTTG CTGGCCTTTT GCTCACATGT
AAVC-Syn-eGFP
L-ITR: 1-141
Syn-1 promoter: 159-730
EGFP ORF: 754-1476
bGHp(A): 1501-1728
R-ITR: 1740-1880
Amp(R): 2797-3654
pUC origin: 3805-4472
SEQ ID NO: 116
      1 CCTGCAGGCA GCTGCGCGCT CGCTCGCTCA CTGAGGCCGC CCGGGCAAAG
    51 CCCGGGCGTC GGGCGACCTT TGGTCGCCCG GCCTCAGTGA GCGAGCGAGC
  101 GCGCAGAGAG GGAGTGGCCA ACTCCATCAC TAGGGGTTCC TGCGGCCTAA
  151 GGCAATTGAC TACAAACCGA GTATCTGCAG AGGGCCCTGC GTATGAGTGC
  201 AAGTGGGTTT TAGGACCAGG ATGAGGCGGG GTGGGGGTGC CTACCTGACG
  251 ACCGACCCCG ACCCACTGGA CAAGCACCCA ACCCCCATTC CCCAAATTGC
  301 GCATCCCCTA TCAGAGAGGG GGAGGGGAAA CAGGATGCGG CGAGGCGCGT
  351 GCGCACTGCC AGCTTCAGCA CCGCGGACAG TGCCTTCGCC CCCGCCTGGC
  401 GGCGCGCGCC ACCGCCGCCT CAGCACTGAA GGCGCGCTGA CGTCACTCGC
  451 CGGTCCCCCG CAAACTCCCC TTCCCGGCCA CCTTGGTCGC GTCCGCGCCG
  501 CCGCCGGCCC AGCCGGACCG CACCACGCGA GGCGCGAGAT AGGGGGGCAC
  551 GGGCGCGACC ATCTGCGCTG CGGCGCCGGC GACTCAGCGC TGCCTCAGTC
  601 TGCGGTGGGC AGCGGAGGAG TCGTGTCGTG CCTGAGAGCG CAGCTGTGCT
  651 CCTGGGCACC GCGCAGTCCG CCCCCGCGGC TCCTGGCCAG ACCACCCCTA
  701 GGACCCCCTG CCCCAAGTCG CAGCCTTCGA GCTAGCCAAA GCTTGCCGCC
  751 ACCATGGTGT CAAAGGGGGA GGAACTGTTT ACTGGAGTCG TGCCTATTCT
  801 GGTCGAACTG GATGGGGATG TCAACGGTCA TAAGTTTAGC GTGTCCGGAG
  851 AGGGAGAGGG CGACGCTACC TACGGAAAGC TGACACTGAA GTTCATCTGC
  901 ACCACAGGCA AGCTGCCCGT GCCTTGGCCA ACCCTGGTGA CCACACTGAC
  951 ATACGGCGTG CAGTGTTTTA GCCGGTACCC AGACCACATG AAGCAGCACG
1001 ATTTCTTTAA GTCCGCCATG CCCGAGGGAT AGGTGGAGGA GAGGACCATC
1051 TTCTTTAAGG ACGATGGCAA CTACAAGACC AGAGCTGAGG TGAAGTTCGA
1101 GGGAGACACA CTGGTGAACC GGATCGAGCT GAAGGGCATC GACTTTAAGG
1151 AGGATGGAAA CATCCTGGGC CACAAGCTGG AGTACAACTA CAACTCTCAC
1201 AACGTGTACA TCATGGCCGA TAAGCAGAAG AACGGAATCA AGGTGAACTT
1251 CAAGATCCGC CACAACATCG AGGACGGCAG CGTGCAGCTG GCTGATCACT
1301 ACCAGCAGAA CACCCCTATC GGAGACGGAC CCGTGCTGCT GCCTGATAAC
1351 CACTACCTGA GCACACAGTC CGCTCTGTCT AAGGACCCAA ACGAGAAGAG
1401 GGATCACATG GTCCTCCTGG AATTTGTCAC TGCTGCTGGG ATTACTCTGG
1451 GGATGGATGA ACTCTATAAG TGATAAGCGG CCGCAACTCG AGACTCTAGA
1501 CGACTGTGCC TTCTAGTTGC CAGCCATCTG TTGTTTGCCC CTCCCCCGTG
1551 CCTTCCTTGA CCCTGGAAGG TGCCACTCCC ACTGTCCTTT CCTAATAAAA
1601 TGAGGAAATT GCATCGCATT GTCTGAGTAG GTGTCATTCT ATTCTGGGGG
1651 GTGGGGTGGG GCAGGACAGC AAGGGGGAGG ATTGGGAAGA CAATAGCAGG
1701 CATGCTGGGG ATGCGGTGGG CTCTATGGCC GCGGGCCGCA GGAACCCCTA
1751 GTGATGGAGT TGGCCACTCC CTCTCTGCGC GCTCGCTCGC TCACTGAGGC
1801 CGGGCGACCA AAGGTCGCCC GACGCCCGGG CTTTGCCCGG GCGGCCTCAG
1851 TGAGCGAGCG AGCGCGCAGC TGCCTGCAGG GGCGCCTGAT GCGGTATTTT
1901 CTCCTTACGC ATCTGTGCGG TATTTCACAC CGCATACGTC AAAGCAACCA
1951 TAGTACGCGC CCTGTAGCGG CGCATTAAGC GCGGCGGGTG TGGTGGTTAC
2001 GCGCAGCGTG ACCGCTACAC TTGCCAGCGC CCTAGCGCCC GCTCCTTTCG
2051 CTTTCTTCCC TTCCTTTCTC GCCACGTTCG CCGGCTTTCC CCGTCAAGCT
2101 CTAAATCGGG GGCTCCCTTT AGGGTTCCGA TTTAGTGCTT TACGGCACCT
2151 CGACCCCAAA AAACTTGATT TGGGTGATGG TTCACGTAGT GGGCCATCGC
2201 CCTGATAGAC GGTTTTTCGC CCTTTGACGT TGGAGTCCAC GTTCTTTAAT
2251 AGTGGACTCT TGTTCCAAAC TGGAACAACA CTCAACCCTA TCTCGGGCTA
2301 TTCTTTTGAT TTATAAGGGA TTTTGCCGAT TTCGGCCTAT TGGTTAAAAA
2351 ATGAGCTGAT TTAACAAAAA TTTAACGCGA ATTTTAACAA AATATTAACG
2401 TTTACAATTT TATGGTGCAC TCTCAGTACA ATCTGCTCTG ATGCCGCATA
2451 GTTAAGCCAG CCCCGACACC CGCCAACACC CGCTGACGCG CCCTGACGGG
2501 CTTGTCTGCT CCCGGCATCC GCTTACAGAC AAGCTGTGAC CGTCTCCGGG
2551 AGCTGCATGT GTCAGAGGTT TTCACCGTCA TCACCGAAAC GCGCGAGACG
2601 AAAGGGCCTC GTGATACGCC TATTTTTATA GGTTAATGTC ATGATAATAA
2651 TGGTTTCTTA GACGTCAGGT GGCACTTTTC GGGGAAATGT GCGCGGAACC
2701 CCTATTTGTT TATTTTTCTA AATACATTCA AATATGTATC CGCTCATGAG
2751 ACAATAACCC TGATAAATGC TTCAATAATA TTGAAAAAGG AAGAGTATGA
2801 GTATTCAACA TTTCCGTGTC GCCCTTATTC CCTTTTTTGC GGCATTTTGC
2851 CTTCCTGTTT TTGCTCACCC AGAAACGCTG GTGAAAGTAA AAGATGCTGA
2901 AGATCAGTTG GGTGCACGAG TGGGTTACAT CGAACTGGAT CTCAACAGCG
2951 GTAAGATCCT TGAGAGTTTT CGCCCCGAAG AACGTTTTCC AATGATGAGC
3001 ACTTTTAAAG TTCTGCTATG TGGCGCGGTA TTATCCCGTA TTGACGCCGG
3051 GCAAGAGCAA CTCGGTCGCC GCATACACTA TTCTCAGAAT GACTTGGTTG
3101 AGTACTCACC AGTCACAGAA AAGCATCTTA CGGATGGCAT GACAGTAAGA
3151 GAATTATGCA GTGCTGCCAT AACCATGAGT GATAACACTG CGGCCAACTT
3201 ACTTCTGACA ACGATCGGAG GACCGAAGGA GCTAACCGCT TTTTTGCACA
3251 ACATGGGGGA TCATGTAACT CGCCTTGATC GTTGGGAACC GGAGCTGAAT
3301 GAAGCCATAC CAAACGACGA GCGTGACACC ACGATGCCTG TAGCAATGGC
3351 AACAACGTTG CGCAAACTAT TAACTGGCGA ACTACTTACT CTAGCTTCCC
3401 GGCAACAATT AATAGACTGG ATGGAGGCGG ATAAAGTTGC AGGACCACTT
3451 CTGCGCTCGG CCCTTCCGGC TGGCTGGTTT ATTGCTGATA AATCTGGAGC
3501 CGGTGAGCGT GGGTCTCGCG GTATCATTGC AGCACTGGGG CCAGATGGTA
3551 AGCCCTCCCG TATCGTAGTT ATCTACACGA CGGGGAGTCA GGCAACTATG
3601 GATGAACGAA ATAGACAGAT CGCTGAGATA GGTGCCTCAC TGATTAAGCA
3651 TTGGTAACTG TCAGACCAAG TTTACTCATA TATACTTTAG ATTGATTTAA
3701 AACTTCATTT TTAATTTAAA AGGATCTAGG TGAAGATCCT TTTTGATAAT
3751 CTCATGACCA AAATCCCTTA ACGTGAGTTT TCGTTCCACT GAGCGTCAGA
3801 CCCCGTAGAA AAGATCAAAG GATCTTCTTG AGATCCTTTT TTTCTGCGCG
3851 TAATCTGCTG CTTGCAAACA AAAAAACCAC CGCTACCAGC GGTGGTTTGT
3901 TTGCCGGATC AAGAGCTACC AACTCTTTTT CCGAAGGTAA CTGGCTTCAG
3951 CAGAGCGCAG ATACCAAATA CTGTCCTTCT AGTGTAGCCG TAGTTAGGCC
4001 ACCACTTCAA GAACTCTGTA GCACCGCCTA CATACCTCGC TCTGCTAATC
4051 CTGTTACCAG TGGCTGCTGC CAGTGGCGAT AAGTCGTGTC TTACCGGGTT
4101 GGACTCAAGA CGATAGTTAC CGGATAAGGC GCAGCGGTCG GGCTGAACGG
4151 GGGGTTCGTG CACACAGCCC AGCTTGGAGC GAACGACCTA CACCGAACTG
4201 AGATACCTAC AGCGTGAGCT ATGAGAAAGC GCCACGCTTC CCGAAGGGAG
4251 AAAGGCGGAC AGGTATCCGG TAAGCGGCAG GGTCGGAACA GGAGAGCGCA
4301 CGAGGGAGCT TCCAGGGGGA AACGCCTGGT ATCTTTATAG TCCTGTCGGG
4351 TTTCGCCACC TCTGACTTGA GCGTCGATTT TTGTGATGCT CGTCAGGGGG
4401 GCGGAGCCTA TGGAAAAACG CCAGCAACGC GGCCTTTTTA CGGTTCCTGG
4451 CCTTTTGCTG GCCTTTTGCT CACATGT
AAVC-Syn-NLS-eGFP
L-ITR: 1-141
Syn-1 promoter: 159-730
NLS-eGFP: 754-1536
bGHp(A): 1561-1788
R-ITR: 1800-1940
Amp(R): 2857-3714
pUC origin: 3865-4532
SEQ ID NO: 117
      1 CCTGCAGGCA GCTGCGCGCT CGCTCGCTCA CTGAGGCCGC CCGGGCAAAG
    51 CCCGGGCGTC GGGCGACCTT TGGTCGCCCG GCCTCAGTGA GCGAGCGAGC
  101 GCGCAGAGAG GGAGTGGCCA ACTCCATCAC TAGGGGTTCC TGCGGCCTAA
  151 GGCAATTGAC TACAAACCGA GTATCTGCAG AGGGCCCTGC GTATGAGTGC
  201 AAGTGGGTTT TAGGACCAGG ATGAGGCGGG GTGGGGGTGC CTACCTGACG
  251 ACCGACCCCG ACCCACTGGA CAAGCACCCA ACCCCCATTC CCCAAATTGC
  301 GCATCCCCTA TCAGAGAGGG GGAGGGGAAA CAGGATGCGG CGAGGCGCGT
  351 GCGCACTGCC AGCTTCAGCA CCGCGGACAG TGCCTTCGCC CCCGCCTGGC
  401 GGCGCGCGCC ACCGCCGCCT CAGCACTGAA GGCGCGCTGA CGTCACTCGC
  451 CGGTCCCCCG CAAACTCCCC TTCCCGGCCA CCTTGGTCGC GTCCGCGCCG
  501 CCGCCGGCCC AGCCGGACCG CACCACGCGA GGCGCGAGAT AGGGGGGCAC
  551 GGGCGCGACC ATCTGCGCTG CGGCGCCGGC GACTCAGCGC TGCCTCAGTC
  601 TGCGGTGGGC AGCGGAGGAG TCGTGTCGTG CCTGAGAGCG CAGCTGTGCT
  651 CCTGGGCACC GCGCAGTCCG CCCCCGCGGC TCCTGGCCAG ACCACCCCTA
  701 GGACCCCCTG CCCCAAGTCG CAGCCTTCGA GCTAGCCAAA GCTTGCCGCC
  751 ACCATGGCCC CAAAAAAGAA AAGAAAAGTG AGGTATCCTG CATTCCTGTA
  801 CAAAGTCGCT ACTATGGTGT CAAAAGGTGA AGAGCTGTTC ACCGGAGTGG
  851 TGCCCATCCT GGTGGAGCTG GACGGAGATG TGAACGGCCA CAAGTTCAGC
  901 GTGTCCGGAG AGGGAGAGGG CGACGCCACC TACGGAAAGC TGACACTGAA
  951 GTTTATCTGC ACCACAGGCA AGCTGCCCGT GCCTTGGCCA ACCCTGGTGA
1001 CCACACTGAC ATACGGCGTG CAGTGTTTCT CTCGGTACCC AGACCACATG
1051 AAGCAGCACG ATTTCTTTAA GAGCGCCATG CCCGAGGGAT ACGTGCAGGA
1101 GAGGACAATC TTCTTTAAGG ACGATGGCAA CTACAAGACC AGAGCTGAGG
1151 TGAAGTTCGA GGGAGACACA CTGGTGAACC GGATCGAGCT GAAGGGCATC
1201 GACTTTAAGG AGGATGGAAA CATCCTGGGC CACAAGCTGG AGTACAACTA
1251 CAACTCCCAC AACGTGTACA TCATGGCCGA TAAGCAGAAG AACGGAATCA
1301 AGGTGAACTT TAAGATCCGC CACAACATCG AGGACGGCTC TGTGCAGCTG
1351 GCTGATCACT ACCAGCAGAA CACCCCTATC GGAGACGGAC CCGTGCTGCT
1401 GCCTGATAAC CACTACCTGT CTACACAGAG CGCCCTGTCC AAGGACCCAA
1451 ACGAGAAGAG GGATCACATG GTGCTCCTGG AATTTGTCAC TGCTGCCGGT
1501 ATTACTCTCG GGATGGATGA ACTGTATAAA TGATAAGCGG CCGCAACTCG
1551 AGACTCTAGA CGACTGTGCC TTCTAGTTGC CAGCCATCTG TTGTTTGCCC
1601 CTCCCCCGTG CCTTCCTTGA CCCTGGAAGG TGCCACTCCC ACTGTCCTTT
1651 CCTAATAAAA TGAGGAAATT GCATCGCATT GTCTGAGTAG GTGTCATTCT
1701 ATTCTGGGGG GTGGGGTGGG GCAGGACAGC AAGGGGGAGG ATTGGGAAGA
1751 CAATAGCAGG CATGCTGGGG ATGCGGTGGG CTCTATGGCC GCGGGCCGCA
1801 GGAACCCCTA GTGATGGAGT TGGCCACTCC CTCTCTGCGC GCTCGCTCGC
1851 TCACTGAGGC CGGGCGACCA AAGGTCGCCC GACGCCCGGG CTTTGCCCGG
1901 GCGGCCTCAG TGAGCGAGCG AGCGCGCAGC TGCCTGCAGG GGCGCCTGAT
1951 GCGGTATTTT CTCCTTACGC ATCTGTGCGG TATTTCACAC CGCATACGTC
2001 AAAGCAACCA TAGTACGCGC CCTGTAGCGG CGCATTAAGC GCGGCGGGTG
2051 TGGTGGTTAC GCGCAGCGTG ACCGCTACAC TTGCCAGCGC CCTAGCGCCC
2101 GCTCCTTTCG CTTTCTTCCC TTCCTTTCTC GCCACGTTCG CCGGCTTTCC
2151 CCGTCAAGCT CTAAATCGGG GGCTCCCTTT AGGGTTCCGA TTTAGTGCTT
2201 TACGGCACCT CGACCCCAAA AAACTTGATT TGGGTGATGG TTCACGTAGT
2251 GGGCCATCGC CCTGATAGAC GGTTTTTCGC CCTTTGACGT TGGAGTCCAC
2301 GTTCTTTAAT AGTGGACTCT TGTTCCAAAC TGGAACAACA CTCAACCCTA
2351 TCTCGGGCTA TTCTTTTGAT TTATAAGGGA TTTTGCCGAT TTCGGCCTAT
2401 TGGTTAAAAA ATGAGCTGAT TTAACAAAAA TTTAACGCGA ATTTTAACAA
2451 AATATTAACG TTTACAATTT TATGGTGCAC TCTCAGTACA ATCTGCTCTG
2501 ATGCCGCATA GTTAAGGCAG CCCCGACACC CGCCAACACC CGCTGACGCG
2551 CCCTGACGGG CTTGTCTGCT CCCGGCATCC GCTTACAGAC AAGCTGTGAC
2601 CGTCTCCGGG AGCTGCATGT GTCAGAGGTT TTCACCGTCA TCACCGAAAC
2651 GCGCGAGACG AAAGGGCCTC GTGATACGCC TATTTTTATA GGTTAATGTC
2701 ATGATAATAA TGGTTTCTTA GACGTCAGGT GGCACTTTTC GGGGAAATGT
2751 GCGCGGAACC CCTATTTGTT TATTTTTCTA AATACATTCA AATATGTATC
2801 CGCTCATGAG ACAATAACCC TGATAAATGC TTCAATAATA TTGAAAAAGG
2851 AAGAGTATGA GTATTCAACA TTTCCGTGTC GCCCTTATTC CCTTTTTTGC
2901 GGCATTTTGC CTTCCTGTTT TTGCTCACCC AGAAACGCTG GTGAAAGTAA
2951 AAGATGCTGA AGATCAGTTG GGTGCACGAG TGGGTTACAT CGAACTGGAT
3001 CTCAACAGCG GTAAGATCCT TGAGAGTTTT CGCCCCGAAG AACGTTTTCC
3051 AATGATGAGC ACTTTTAAAG TTCTGCTATG TGGCGCGGTA TTATCCCGTA
3101 TTGACGCCGG GCAAGAGCAA CTCGGTCGCC GCATACACTA TTCTCAGAAT
3151 GACTTGGTTG AGTACTCACC AGTCACAGAA AAGCATCTTA CGGATGGCAT
3201 GACAGTAAGA GAATTATGCA GTGCTGCCAT AACCATGAGT GATAACACTG
3251 CGGCCAACTT ACTTCTGACA AGGATGGGAG GACCGAAGGA GCTAACCGCT
3301 TTTTTGGACA ACATGGGGGA TCATGTAACT CGCCTTGATC GTTGGGAACC
3351 GGAGCTGAAT GAAGCCATAC CAAACGACGA GCGTGACACC ACGATGCCTG
3401 TAGCAATGGC AACAACGTTG CGCAAACTAT TAACTGGCGA ACTACTTACT
3451 CTAGCTTCCC GGCAACAATT AATAGACTGG ATGGAGGCGG ATAAAGTTGC
3501 AGGACCACTT CTGCGCTCGG CCCTTCCGGC TGGCTGGTTT ATTGCTGATA
3551 AATCTGGAGC CGGTGAGCGT GGGTCTCGCG GTATCATTGC AGCACTGGGG
3601 CCAGATGGTA AGCCCTCCCG TATCGTAGTT ATCTACACGA CGGGGAGTCA
3651 GGCAACTATG GATGAACGAA ATAGACAGAT CGCTGAGATA GGTGCCTCAC
3701 TGATTAAGCA TTGGTAACTG TCAGACCAAG TTTACTCATA TATACTTTAG
3751 ATTGATTTAA AACTTCATTT TTAATTTAAA AGGATCTAGG TGAAGATCCT
3801 TTTTGATAAT CTCATGACCA AAATCCCTTA ACGTGAGTTT TCGTTCCACT
3851 GAGCGTCAGA CCCCGTAGAA AAGATCAAAG GATCTTCTTG AGATCCTTTT
3901 TTTCTGCGCG TAATCTGCTG CTTGCAAACA AAAAAACCAC CGCTACCAGC
3951 GGTGGTTTGT TTGCCGGATC AAGAGGTACC AACTCTTTTT CCGAAGGTAA
4001 CTGGCTTCAG CAGAGCGCAG ATACCAAATA CTGTCCTTCT AGTGTAGCCG
4051 TAGTTAGGCC ACCACTTCAA GAACTCTGTA GCACCGCCTA CATACCTCGC
4101 TCTGCTAATC CTGTTACCAG TGGCTGCTGC CAGTGGCGAT AAGTCGTGTC
4151 TTACCGGGTT GGACTCAAGA CGATAGTTAC CGGATAAGGC GCAGCGGTCG
4201 GGCTGAACGG GGGGTTCGTG CACACAGCCC AGCTTGGAGC GAACGACCTA
4251 CACCGAACTG AGATACCTAC AGCGTGAGCT ATGAGAAAGC GCCACGCTTC
4301 CCGAAGGGAG AAAGGCGGAC AGGTATCCGG TAAGCGGCAG GGTCGGAACA
4351 GGAGAGCGCA CGAGGGAGCT TCCAGGGGGA AACGCCTGGT ATCTTTATAG
4401 TCCTGTCGGG TTTCGCCACC TCTGACTTGA GCGTCGATTT TTGTGATGCT
4451 CGTCAGGGGG GCGGAGCCTA TGGAAAAACG CCAGCAACGC GGCCTTTTTA
4501 CGGTTCCTGG CCTTTTGCTG GCCTTTTGCT CACATGT
AAVC-Syn-mBPIP-TATκ28-hCDKL5-107
L-ITR: 1-141
Syn-1 promoter: 159-730
Bip-TATκ28-hCDKL5-107: 754-3819
bGHp(A): 3844-4071
R-ITR: 4083-4223
Amp(R): 5140-5997
pUC origin: 6148-6815
SEQ ID NO: 118
      1 CCTGCAGGCA GCTGCGCGCT CGCTCGCTCA CTGAGGCCGC CCGGGCAAAG
    51 CCCGGGCGTC GGGCGACCTT TGGTCGCCCG GCCTCAGTGA GCGAGCGAGC
  101 GCGCAGAGAG GGAGTGGCCA ACTCCATCAC TAGGGGTTCC TGCGGCCTAA
  151 GGCAATTGAC TACAAACCGA GTATCTGCAG AGGGCCCTGC GTATGAGTGC
  201 AAGTGGGTTT TAGGACCAGG ATGAGGCGGG GTGGGGGTGC CTACCTGACG
  251 ACCGACCCCG ACCCACTGGA CAAGCACCCA ACCCCCATTC CCCAAATTGC
  301 GCATCCCCTA TCAGAGAGGG GGAGGGGAAA CAGGATGCGG CGAGGCGCGT
  351 GCGCACTGCC AGCTTCAGCA CCGCGGACAG TGCCTTCGCC CCCGCCTGGC
  401 GGCGCGCGCC ACCGCCGCCT CAGCACTGAA GGCGCGCTGA CGTCACTCGC
  451 CGGTCCCCCG CAAACTCCCC TTCCCGGCCA CCTTGGTCGC GTCCGCGCCG
  501 CCGCCGGCCC AGCCGGACCG CACCACGCGA GGCGCGAGAT AGGGGGGCAC
  551 GGGCGCGACC ATCTGCGCTG CGGCGCCGGC GACTCAGCGC TGCCTCAGTC
  601 TGCGGTGGGC AGCGGAGGAG TCGTGTCGTG CCTGAGAGCG CAGCTGTGCT
  651 CCTGGGCACC GCGCAGTCCG CCCCCGCGGC TCCTGGCCAG ACCACCCCTA
  701 GGACCCCCTG CCCCAAGTCG CAGCCTTCGA GCTAGCCAAA GCTTGCCGCC
  751 ACCATGAAAC TCTCCCTGGT CGCTGCTATG CTGCTCCTCC TGTCCCTCGT
  801 CGCTGCTATG CTCCTGCTGC TGTCTGCCGC TCGGGCTGGT GATGCTGCTC
  851 AGCCAGCTAG GAGAGCTAGG AGGACCAAGC TGGCTGCTTA CGCTAGAAAG
  901 GCTGCTAGAC AGGCTAGGGC TGGAGGAGGC GGATCCAAGA TCCCCAACAT
  951 CGGCAACGTG ATGAACAAGT TCGAGATCCT GGGAGTGGTG GGAGAGGGAG
1001 CTTACGGAGT GGTGCTGAAG TGCCGGCACA AGGAGACACA CGAGATCGTG
1051 GCTATCAAGA AGTTTAAGGA CAGCGAGGAG AACGAGGAGG TGAAGGAGAC
1101 AACCCTGCGC GAGCTGAAGA TGCTGAGGAC ACTGAAGCAG GAGAACATCG
1151 TGGAGCTGAA GGAGGCCTTC AGGAGACGGG GAAAGCTGTA CCTGGTGTTT
1201 GAGTACGTGG AGAAGAACAT GCTGGAGCTG CTGGAGGAGA TGCCAAACGG
1251 AGTGCCACCT GAGAAGGTGA AGTCCTACAT CTACCAGCTG ATCAAGGCTA
1301 TCCACTGGTG CCACAAGAAC GACATCGTGC ACCGCGATAT CAAGCCTGAG
1351 AACCTGCTGA TCTCCCACAA CGACGTGCTG AAGCTGTGCG ATTTCGGCTT
1401 TGCCAGGAAC CTGAGCGAGG GAAACAACGC CAACTACACA GAGTACGTGG
1451 CTACCCGCTG GTACAGGAGC CCAGAGCTGC TGCTGGGAGC TCCATACGGA
1501 AAGAGCGTGG ACATGTGGTC CGTGGGCTGC ATCCTGGGAG AGCTGTCTGA
1551 CGGCCAGCCT CTGTTCCCAG GAGAGAGCGA GATCGATCAG CTGTTTACCA
1601 TCCAGAAGGT GCTGGGCCCT CTGCCAAGCG AGCAGATGAA GCTGTTCTAC
1651 TCCAACCCTC GCTTCCACGG ACTGAGGTTT CCCGCCGTGA ACCACCCTCA
1701 GAGCCTGGAG CGCAGGTACC TGGGCATCCT GAACTCCGTG CTGCTGGATC
1751 TGATGAAGAA CCTGCTGAAG CTGGACCCCG CCGATAGATA CCTGACCGAG
1801 CAGTGTCTGA ACCACCCTAC ATTTCAGACC CAGAGACTGC TGGACCGGAG
1851 CCCTTCCCGC TCTGCTAAGA GGAAGCCATA CCACGTGGAG AGCTCCACCC
1901 TGTCCAACCG CAACCAGGCC GGCAAGTCTA CAGCTCTGCA GAGCCACCAC
1951 AGGAGCAACT CCAAGGACAT CCAGAACCTG TCTGTGGGCC TGCCTAGGGC
2001 TGATGAGGGA CTGCCAGCTA ACGAGAGCTT CCTGAACGGC AACCTGGCCG
2051 GAGCTTCTCT GAGCCCACTG CACACAAAGA CCTACCAGGC CTCTAGCCAG
2101 CCCGGCTCCA CATCTAAGGA CCTGACCAAC AACAACATCC CACACCTGCT
2151 GTCTCCCAAG GAGGCTAAGA GCAAGACCGA GTTCGACTTT AACATCGATC
2201 CCAAGCCTAG CGAGGGCCCT GGAACAAAGT ACCTGAAGAG CAACTCCAGA
2251 TCTCAGCAGA ACCGGCACTC CTTCATGGAG TCCTCTCAGT CTAAGGCCGG
2301 CACCCTGCAG CCAAAGGAGA AGCAGAGCCG GCACTCCTAC ATCGATACCA
2351 TCCCCCAGAG CTCCCGCAGC CCTTCCTACA GGACAAAGGC CAAGAGCCAC
2401 GGCGCTCTGT CTGACAGCAA GTCCGTGTCT AACCTGTCCG AGGCCAGAGC
2451 TCAGATCGCT GAGCCAAGCA CCTCCAGGTA CTTTCCTTCT AGCTGTCTGG
2501 ACCTGAACTC TCCTACAAGC CCAACACCCA CCAGACACAG CGATACACGG
2551 ACCCTGCTGT CTCCAAGCGG CAGAAACAAC CGGAACGAGG GAACCCTGGA
2601 TTCTAGACGG ACCACAACCA GGCACAGCAA GACAATGGAG GAGCTGAAGC
2651 TGCCAGAGCA CATGGACTCC TCTCACTCCC ACTCTCTGAG CGCCCCCCAC
2701 GAGTCCTTCT CTTACGGCCT GGGATACACC TCCCCCTTCA GCTCCCAGCA
2751 GCGCCCCCAC AGGCACTCTA TGTACGTGAC AAGAGACAAG GTGCGGGCCA
2801 AGGGCCTGGA TGGAAGCCTG TTCATCGGCC AGGGAATGGC CGCTAGAGCT
2851 AACTCCCTGC AGCTGCTGTC TCCTCAGCCA GGAGAGCAGC TGCCACCCGA
2901 GATGACCGTG GCCAGATCTA GCGTGAAGGA GACAAGCCGG GAGGGCACCT
2951 CCTCTTTCCA CACAAGACAG AAGTCCGAGG GCGGAGTGTA CCACGACCCC
3001 CACTCTGACG ATGGAACAGC TCCTAAGGAG AACCGGCACC TGTACAACGA
3051 TCCCGTGCCT CGCAGGGTGG GCTCCTTCTA CCGCGTGCCA TCTCCCAGGC
3101 CTGACAACAG CTTTCACGAG AACAACGTGT CCACCAGAGT GAGCTCCCTG
3151 CCATCTGAGT CTAGCTCCGG AACAAACCAC TCTAAGCGGC AGCCCGCCTT
3201 CGATCCTTGG AAGAGCCCAG AGAACATCTC TCACAGCGAG CAGCTGAAGG
3251 AGAAGGAGAA GCAGGGCTTC TTTCGCAGCA TGAAGAAGAA GAAGAAGAAG
3301 AGCCAGACCG TGCCTAACTC CGACTCTCCA GATCTGCTGA CCCTGCAGAA
3351 GTCCATCCAC AGCGCCTCCA CACCCTCTAG CAGACCTAAG GAGTGGCGGC
3401 CTGAGAAGAT CAGCGATCTG CAGACACAGA GCCAGCCACT GAAGTCCCTG
3451 AGGAAGCTGC TGCACCTGTC CTCTGCCAGC AACCACCCAG CTAGCTCCGA
3501 CCCAAGGTTC CAGCCACTGA CAGCTCAGCA GACCAAGAAC TCTTTTAGCG
3551 AGATCAGGAT CCACCCTCTG TCCCAGGCTT CTGGCGGATC TAGCAACATC
3601 AGGCAGGAGC CAGCTCCAAA GGGCAGGCCC GCTCTGCAGC TGCCTGGACA
3651 GATGGACCCA GGATGGCACG TGTCCTCTGT GACAAGGTCC GCCACCGAGG
3701 GACCATCCTA CTCTGAGCAG CTGGGCGCTA AGTCTGGCCC TAACGGACAC
3751 CCATACAACC GAACAAATAG AAGTAGGATG CCAAACCTCA ATGACCTCAA
3801 GGAAACTGCC CTGTGATAAG CGGCCGCAAC TCGAGACTCT AGACGACTGT
3851 GCCTTCTAGT TGCCAGCCAT CTGTTGTTTG CCCCTCCCCC GTGCCTTCCT
3901 TGACCCTGGA AGGTGCCACT CCCACTGTCC TTTCCTAATA AAATGAGGAA
3951 ATTGCATCGC ATTGTCTGAG TAGGTGTCAT TCTATTCTGG GGGGTGGGGT
4001 GGGGCAGGAC AGCAAGGGGG AGGATTGGGA AGACAATAGC AGGCATGCTG
4051 GGGATGCGGT GGGCTCTATG GCCGCGGGCC GCAGGAACCC CTAGTGATGG
4101 AGTTGGCCAC TCCCTCTCTG CGCGCTCGCT CGCTCACTGA GGCCGGGCGA
4151 CCAAAGGTCG CCCGACGCCC GGGCTTTGCC CGGGCGGCCT CAGTGAGCGA
4201 GCGAGCGCGC AGCTGCCTGC AGGGGCGCCT GATGCGGTAT TTTCTCCTTA
4251 CGCATCTGTG CGGTATTTCA CACCGCATAC GTCAAAGCAA CCATAGTACG
4301 CGCCCTGTAG CGGCGCATTA AGCGCGGCGG GTGTGGTGGT TACGCGCAGC
4351 GTGACCGCTA CACTTGCCAG CGCCCTAGCG CCCGCTCCTT TCGCTTTCTT
4401 CCCTTCCTTT CTCGCCACGT TCGCCGGCTT TCCCCGTCAA GCTCTAAATC
4451 GGGGGCTCCC TTTAGGGTTC CGATTTAGTG CTTTACGGCA CCTCGACCCC
4501 AAAAAACTTG ATTTGGGTGA TGGTTCACGT AGTGGGCCAT CGCCCTGATA
4551 GACGGTTTTT CGCCCTTTGA CGTTGGAGTC CACGTTCTTT AATAGTGGAC
4601 TCTTGTTCCA AACTGGAACA ACACTCAACC CTATCTCGGG CTATTCTTTT
4651 GATTTATAAG GGATTTTGCC GATTTCGGCC TATTGGTTAA AAAATGAGCT
4701 GATTTAACAA AAATTTAACG CGAATTTTAA CAAAATATTA ACGTTTACAA
4751 TTTTATGGTG CACTCTCAGT ACAATCTGCT CTGATGCCGC ATAGTTAAGC
4801 CAGCCCCGAC ACCCGCCAAC ACCCGCTGAC GCGCCCTGAC GGGCTTGTCT
4851 GCTCCCGGCA TCCGCTTACA GACAAGCTGT GACCGTCTCC GGGAGCTGCA
4901 TGTGTCAGAG GTTTTCACCG TCATCACCGA AACGCGCGAG ACGAAAGGGC
4951 CTCGTGATAC GCCTATTTTT ATAGGTTAAT GTCATGATAA TAATGGTTTC
5001 TTAGACGTCA GGTGGCACTT TTCGGGGAAA TGTGCGCGGA ACCCCTATTT
5051 GTTTATTTTT CTAAATACAT TCAAATATGT ATCCGCTCAT GAGACAATAA
5101 CCCTGATAAA TGCTTCAATA ATATTGAAAA AGGAAGAGTA TGAGTATTCA
5151 ACATTTCCGT GTCGCCCTTA TTCCCTTTTT TGCGGCATTT TGCCTTCCTG
5201 TTTTTGCTCA CCCAGAAACG CTGGTGAAAG TAAAAGATGC TGAAGATCAG
5251 TTGGGTGCAC GAGTGGGTTA CATCGAACTG GATCTCAACA GCGGTAAGAT
5301 CCTTGAGAGT TTTCGCCCCG AAGAACGTTT TCCAATGATG AGCACTTTTA
5351 AAGTTCTGCT ATGTGGCGCG GTATTATCCC GTATTGACGC CGGGCAAGAG
5401 CAACTCGGTC GCCGCATACA CTATTCTCAG AATGACTTGG TTGAGTACTC
5451 ACCAGTCACA GAAAAGCATC TTACGGATGG CATGACAGTA AGAGAATTAT
5501 GCAGTGCTGC CATAACCATG AGTGATAACA CTGCGGCCAA CTTACTTCTG
5551 ACAACGATCG GAGGACCGAA GGAGCTAACC GCTTTTTTGC ACAACATGGG
5601 GGATCATGTA ACTCGCCTTG ATCGTTGGGA ACCGGAGCTG AATGAAGCCA
5651 TACCAAACGA CGAGCGTGAC ACCACGATGC CTGTAGCAAT GGCAACAACG
5701 TTGCGCAAAC TATTAACTGG CGAACTACTT ACTCTAGCTT CCCGGCAACA
5751 ATTAATAGAC TGGATGGAGG CGGATAAAGT TGCAGGACCA CTTCTGCGCT
5801 CGGCCCTTCC GGCTGGCTGG TTTATTGCTG ATAAATCTGG AGCCGGTGAG
5851 CGTGGGTCTC GCGGTATCAT TGCAGCACTG GGGCCAGATG GTAAGCCCTC
5901 CCGTATCGTA GTTATCTACA CGACGGGGAG TCAGGCAACT ATGGATGAAC
5951 GAAATAGACA GATCGCTGAG ATAGGTGCCT CACTGATTAA GCATTGGTAA
6001 CTGTCAGACC AAGTTTACTC ATATATACTT TAGATTGATT TAAAACTTCA
6051 TTTTTAATTT AAAAGGATCT AGGTGAAGAT CCTTTTTGAT AATCTCATGA
6101 CCAAAATCCC TTAACGTGAG TTTTCGTTCC ACTGAGCGTC AGACCCCGTA
6151 GAAAAGATCA AAGGATCTTC TTGAGATCCT TTTTTTCTGC GCGTAATCTG
6201 CTGCTTGCAA ACAAAAAAAC CACCGCTACC AGCGGTGGTT TGTTTGCCGG
6251 ATCAAGAGCT ACCAACTCTT TTTCCGAAGG TAACTGGCTT CAGCAGAGCG
6301 CAGATACCAA ATACTGTCCT TCTAGTGTAG CCGTAGTTAG GCCACCACTT
6351 CAAGAACTCT GTAGCACCGC CTACATACCT CGCTCTGCTA ATCCTGTTAC
6401 CAGTGGCTGC TGCCAGTGGC GATAAGTCGT GTCTTACCGG GTTGGACTCA
6451 AGACGATAGT TACCGGATAA GGCGCAGCGG TCGGGCTGAA CGGGGGGTTC
6501 GTGCACACAG CCCAGCTTGG AGCGAACGAC CTACACCGAA CTGAGATACC
6551 TACAGCGTGA GCTATGAGAA AGCGCCACGC TTCCCGAAGG GAGAAAGGCG
6601 GACAGGTATC CGGTAAGCGG CAGGGTCGGA ACAGGAGAGC GCACGAGGGA
6651 GCTTCCAGGG GGAAACGCCT GGTATCTTTA TAGTCCTGTC GGGTTTCGCC
6701 ACCTCTGACT TGAGCGTCGA TTTTTGTGAT GCTCGTCAGG GGGGCGGAGC
6751 CTATGGAAAA ACGCCAGCAA CGCGGCCTTT TTACGGTTCC TGGCCTTTTG
6801 CTGGCCTTTT GCTCACATGT
AAVC-Syn-mBPIP-TATκ28-hCDKL5-107 (dead kinase)
L-ITR: 1-141
Syn-1 promoter: 159-730
Bip-TATκ28-hCDKL5-107 (kinase dead): 754-3819
bGHp(A): 3844-4071
R-ITR: 4083-4223
Amp(R): 5140-5997
pUC origin: 6148-6815
SEQ ID NO: 119
      1 CCTGCAGGCA GCTGCGCGCT CGCTCGCTCA CTGAGGCCGC CCGGGCAAAG
    51 CCCGGGCGTC GGGCGACCTT TGGTCGCCCG GCCTCAGTGA GCGAGCGAGC
  101 GCGCAGAGAG GGAGTGGCCA ACTCCATCAC TAGGGGTTCC TGCGGCCTAA
  151 GGCAATTGAC TACAAACCGA GTATCTGCAG AGGGCCCTGC GTATGAGTGC
  201 AAGTGGGTTT TAGGACCAGG ATGAGGCGGG GTGGGGGTGC CTACCTGACG
  251 ACCGACCCCG ACCCACTGGA CAAGGACCCA ACCCCCATTC CCCAAATTGC
  301 GCATCCCCTA TCAGAGAGGG GGAGGGGAAA CAGGATGCGG CGAGGCGCGT
  351 GCGCACTGCC AGCTTCAGCA CCGCGGACAG TGCCTTCGCC CCCGCCTGGC
  401 GGCGCGCGCC ACCGCCGCCT CAGCACTGAA GGCGCGCTGA CGTCACTCGC
  451 CGGTCCCCCG CAAACTCCCC TTCCCGGCCA CCTTGGTCGC GTCCGCGCCG
  501 CCGCCGGCCC AGCCGGACCG CACCACGCGA GGCGCGAGAT AGGGGGGCAC
  551 GGGCGCGACC ATCTGCGCTG CGGCGCCGGC GACTCAGCGC TGCCTCAGTC
  601 TGCGGTGGGC AGCGGAGGAG TCGTGTCGTG CCTGAGAGCG CAGCTGTGCT
  651 CCTGGGCACC GCGCAGTCCG CCCCCGCGGC TCCTGGCCAG ACCACCCCTA
  701 GGACCCCCTG CCCCAAGTCG CAGCCTTCGA GCTAGCCAAA GCTTGCCGCC
  751 ACCATGAAAC TCTCCCTCGT CGCCGCTATG CTCCTGCTCC TCTCCCTCGT
  801 CGCTGCCATG CTCCTGCTGC TCAGTGCCGC TCGGGCCGGA GATGCTGCTC
  851 AGCCAGCTAG GAGAGCTAGG AGGACCAAGC TGGCTGCTTA CGCTAGGAAG
  901 GCTGCTAGGC AGGCTAGGGC TGGCGGAGGC GGATCCAAGA TCCCCAACAT
  951 CGGCAACGTG ATGAACAAGT TCGAGATCCT GGGAGTGGTG GGAGAGGGAG
1001 CTTACGGAGT GGTGCTGAAG TGCAGGCACA AGGAGACACA CGAGATCGTG
1051 GCTATCAGGA GGTTCAAGGA CAGCGAGGAG AACGAGGAGG TGAAGGAGAC
1101 AACCCTGAGA GAGCTGAAGA TGCTGCGGAC ACTGAAGCAG GAGAACATCG
1151 TGGAGCTGAA GGAGGCCTTC CGGCGCAGGG GAAAGCTGTA CCTGGTGTTT
1201 GAGTACGTGG AGAAGAACAT GCTGGAGCTG CTGGAGGAGA TGCCAAACGG
1251 AGTGCCACCT GAGAAGGTGA AGTCCTACAT CTACCAGCTG ATCAAGGCTA
1301 TCCACTGGTG CCACAAGAAC GACATCGTGC ACAGAGATAT CAAGCCTGAG
1351 AACCTGCTGA TCTCCCACAA CGACGTGCTG AAGCTGTGCG ATTTCGGCTT
1401 TGCCCGGAAC CTGAGCGAGG GAAACAAGCG CAACTACACA GAGTACGTGG
1451 CTACCAGATG GTACCGGAGC CCAGAGCTGC TGCTGGGAGC TCCATACGGA
1501 AAGAGCGTGG ACATGTGGTC CGTGGGCTGC ATCCTGGGAG AGCTGTCTGA
1551 CGGCCAGCCT CTGTTCCCAG GAGAGAGCGA GATCGATCAG CTGTTTACCA
1601 TCCAGAAGGT GCTGGGCCCT CTGCCAAGCG AGCAGATGAA GCTGTTCTAC
1651 TCCAACCCTA GATTCCACGG ACTGCGGTTT CCCGCCGTGA ACCACCCTCA
1701 GAGCCTGGAG AGACGGTACC TGGGCATCCT GAACTCCGTG CTGCTGGATC
1751 TGATGAAGAA CCTGCTGAAG CTGGACCCCG CCGATCGCTA CCTGACCGAG
1801 CAGTGTCTGA ACCACCCTAC ATTTCAGACC CAGCGCCTGC TGGACAGGAG
1851 CCCTTCCAGA TCTGCTAAGC GGAAGCCATA CCACGTGGAG AGCTCCACCC
1901 TGTCCAACAG AAACCAGGCC GGCAAGTCTA CAGCTCTGCA GAGCCACCAC
1951 CGGAGCAACT CCAAGGACAT CCAGAACCTG TCTGTGGGCC TGCCTAGAGC
2001 CGATGAGGGA CTGCCAGCTA ACGAGAGCTT CCTGAACGGC AACCTGGCCG
2051 GAGCTTCTCT GAGCCCACTG CACACAAAGA CCTACCAGGC CTCTAGCCAG
2101 CCCGGCTCCA CATCTAAGGA CCTGACCAAC AACAACATCC CACACCTGCT
2151 GTCTCCCAAG GAGGCTAAGA GCAAGACCGA GTTCGACTTT AACATCGATC
2201 CCAAGCCTAG CGAGGGCCCT GGAACAAAGT ACCTGAAGAG CAACTCCCGC
2251 TCTCAGCAGA ACAGGCACTC CTTCATGGAG TCCTCTCAGT CTAAGGCCGG
2301 CACCCTGCAG CCAAACGAGA AGCAGAGCAG ACACTCCTAC ATCGATACCA
2351 TCCCCCAGAG CTCCAGAAGC CCTTCCTACC GGACAAAGGC CAAGAGCCAC
2401 GGCGCTCTGT CTGACAGCAA GTCCGTGTCT AACCTGTCCG AGGCTAGGGC
2451 TCAGATCGCT GAGCCCAGCA CCTCCAGGTA CTTTCCTTCT AGCTGTCTGG
2501 ACCTGAACTC TCCTACAAGC CCAACACCCA CCCGCCACAG CGATACAAGG
2551 ACCCTGCTGT CTCCAAGCGG CAGGAACAAC AGGAACGAGG GAACCCTGGA
2601 TTCTCGCAGG ACCACAACCC GGCACAGCAA GACAATGGAG GAGCTGAAGC
2651 TGCCAGAGCA CATGGACTCC TCTCACTCCC ACTCTCTGAG CGCCCCCCAC
2701 GAGTCCTTCT CTTACGGCCT GGGATACACC TCCCCCTTCA GCTCCCAGCA
2751 GAGGCCCCAC AGGCACTCTA TGTACGTGAC ACGCGACAAG GTGAGGGCCA
2801 AGGGCCTGGA TGGAAGCCTG TCCATCGGCC AGGGAATGGC CGCTAGGGCT
2851 AACTCCCTGC AGCTGCTGTC TCCTCAGCCA GGAGAGCAGC TGCCACCAGA
2901 GATGACCGTG GCTCGCTCTA GCGTGAAGGA GACAAGCAGG GAGGGCACCT
2951 CCTCTTTCCA CACACGCCAG AAGTCCGAGG GCGGAGTGTA CCACGACCCC
3001 CACTCTGACG ATGGAACAGC TCCTAAGGAG AACAGGCACC TGTACAACGA
3051 TCCCGTGCCT AGACGGGTGG GCTCCTTCTA CAGAGTGCCA TCTCCCCGGC
3101 CTGACAACAG CTTTCACGAG AACAACGTGT CCACCCGCGT GAGCTCCCTG
3151 CCATCTGAGT CTAGCTCCGG AACAAACCAC TCTAAGAGGC AGCCCGCCTT
3201 CGATCCTTGG AAGAGCCCAG AGAACATCTC TCACAGCGAG CAGCTGAAGG
3251 AGAAGGAGAA GCAGGGCTTC TTTAGAAGCA TGAAGAAGAA GAAGAAGAAG
3301 AGCCAGACCG TGCCTAACTC CGACTCTCCA GATCTGCTGA CCCTGCAGAA
3351 GTCCATCCAC AGCGCCTCCA CACCATCTAG CCGCCCTAAG GAGTGGAGGC
3401 CTGAGAAGAT CAGCGATCTG CAGACACAGA GCCAGCCACT GAAGTCCCTG
3451 CGGAAGCTGC TGCACCTGTC CTCTGCCAGC AACCACCCCG CTAGCTCCGA
3501 CCCAAGATTC CAGCCCCTGA CAGCCCAGCA GACCAAGAAC TCTTTTAGCG
3551 AGATCCGGAT CCACCCTCTG TCCCAGGCTT CTGGCGGATC TAGCAACATC
3601 AGACAGGAGC CAGCTCCAAA GGGCCGGCCC GCTCTGCAGC TGCCTGGCCA
3651 GATGGACCCA GGATGGCACG TGTCCTCTGT GACAAGGTCC GCCACCGAGG
3701 GACCATCCTA CTCTGAGCAG CTGGGCGCTA AGTCTGGCCC TAACGGACAC
3751 CCATACAATA GGACTAATCG CAGCAGAATG CCCAACCTGA ACGACCTCAA
3801 GGAAACAGCA CTCTGATAAG CGGCCGCAAC TCGAGACTCT AGACGACTGT
3851 GCCTTCTAGT TGCCAGCCAT CTGTTGTTTG CCCCTCCCCC GTGCCTTCCT
3901 TGACCCTGGA AGGTGCCACT CCCACTGTCC TTTCCTAATA AAATGAGGAA
3951 ATTGCATCGC ATTGTCTGAG TAGGTGTCAT TCTATTCTGG GGGGTGGGGT
4001 GGGGCAGGAC AGCAAGGGGG AGGATTGGGA AGACAATAGC AGGCATGCTG
4051 GGGATGCGGT GGGCTCTATG GCCGCGGGCC GCAGGAACCC CTAGTGATGG
4101 AGTTGGCCAC TCCCTCTCTG CGCGCTCGCT CGCTCACTGA GGCCGGGCGA
4151 CCAAAGGTCG CCCGACGCCC GGGCTTTGCC CGGGCGGCCT CAGTGAGCGA
4201 GCGAGCGCGC AGCTGCCTGC AGGGGCGCCT GATGCGGTAT TTTCTCCTTA
4251 CGCATCTGTG CGGTATTTCA CACCGCATAC GTCAAAGCAA CCATAGTACG
4301 CGCCCTGTAG CGGCGCATTA AGCGCGGCGG GTGTGGTGGT TACGCGCAGC
4351 GTGACCGCTA CACTTGCCAG CGCCCTAGCG CCCGCTCCTT TCGCTTTCTT
4401 CCCTTCCTTT CTCGCCACGT TCGCCGGCTT TCCCCGTCAA GCTCTAAATC
4451 GGGGGCTCCC TTTAGGGTTC CGATTTAGTG CTTTACGGCA CCTCGACCCC
4501 AAAAAACTTG ATTTGGGTGA TGGTTCACGT AGTGGGCCAT CGCCCTGATA
4551 GACGGTTTTT CGCCCTTTGA CGTTGGAGTC CACGTTCTTT AATAGTGGAC
4601 TCTTGTTCCA AACTGGAACA ACACTCAACC CTATCTCGGG CTATTCTTTT
4651 GATTTATAAG GGATTTTGCC GATTTCGGCC TATTGGTTAA AAAATGAGCT
4701 GATTTAACAA AAATTTAACG CGAATTTTAA CAAAATATTA ACGTTTACAA
4751 TTTTATGGTG CACTCTCAGT ACAATCTGCT CTGATGCCGC ATAGTTAAGC
4801 CAGCCCCGAC ACCCGCCAAC ACCCGCTGAC GCGCCCTGAC GGGCTTGTCT
4851 GCTCCCGGCA TCCGCTTACA GACAAGCTGT GACCGTCTCC GGGAGCTGCA
4901 TGTGTCAGAG GTTTTCACCG TCATCACCGA AACGCGCGAG ACGAAAGGGC
4951 CTCGTGATAC GCCTATTTTT ATAGGTTAAT GTCATGATAA TAATGGTTTC
5001 TTAGACGTCA GGTGGCACTT TTCGGGGAAA TGTGCGCGGA ACCCCTATTT
5051 GTTTATTTTT CTAAATACAT TCAAATATGT ATCCGCTCAT GAGACAATAA
5101 CCCTGATAAA TGCTTCAATA ATATTGAAAA AGGAAGAGTA TGAGTATTCA
5151 ACATTTCCGT GTCGCCCTTA TTCCCTTTTT TGCGGCATTT TGCCTTCCTG
5201 TTTTTGCTCA CCCAGAAACG CTGGTGAAAG TAAAAGATGC TGAAGATCAG
5251 TTGGGTGCAC GAGTGGGTTA CATCGAACTG GATCTCAACA GCGGTAAGAT
5301 CCTTGAGAGT TTTCGCCCCG AAGAACGTTT TCCAATGATG AGCACTTTTA
5351 AAGTTCTGCT ATGTGGCGCG GTATTATCCC GTATTGACGC CGGGCAAGAG
5401 CAACTCGGTC GCCGCATACA CTATTCTCAG AATGACTTGG TTGAGTACTC
5451 ACCAGTCACA GAAAAGCATC TTACGGATGG CATGACAGTA AGAGAATTAT
5501 GCAGTGCTGC CATAACCATG AGTGATAACA CTGCGGCCAA CTTACTTCTG
5551 ACAACGATCG GAGGACCGAA GGAGCTAACC GCTTTTTTGC ACAACATGGG
5601 GGATCATGTA ACTCGCCTTG ATCGTTGGGA ACCGGAGCTG AATGAAGCCA
5651 TACCAAACGA CGAGCGTGAC ACCACGATGC CTGTAGCAAT GGCAACAACG
5701 TTGCGCAAAC TATTAACTGG CGAACTACTT ACTCTAGCTT CCCGGCAACA
5751 ATTAATAGAC TGGATGGAGG CGGATAAAGT TGCAGGACCA CTTCTGCGCT
5801 CGGCCCTTCC GGCTGGCTGG TTTATTGCTG ATAAATCTGG AGCCGGTGAG
5851 CGTGGGTCTC GCGGTATCAT TGCAGCACTG GGGCCAGATG GTAAGCCCTC
5901 CCGTATCGTA GTTATCTACA CGACGGGGAG TCAGGCAACT ATGGATGAAC
5951 GAAATAGACA GATCGCTGAG ATAGGTGCCT CACTGATTAA GCATTGGTAA
6001 CTGTCAGACC AAGTTTACTC ATATATACTT TAGATTGATT TAAAACTTCA
6051 TTTTTAATTT AAAAGGATCT AGGTGAAGAT CCTTTTTGAT AATCTCATGA
6101 CCAAAATCCC TTAACGTGAG TTTTCGTTCC ACTGAGCGTC AGACCCCGTA
6151 GAAAAGATCA AAGGATCTTC TTGAGATCCT TTTTTTCTGC GCGTAATCTG
6201 CTGCTTGCAA ACAAAAAAAC CACCGCTACC AGCGGTGGTT TGTTTGCCGG
6251 ATCAAGAGCT ACCAACTCTT TTTCCGAAGG TAACTGGCTT CAGCAGAGCG
6301 CAGATACCAA ATACTGTCCT TCTAGTGTAG CCGTAGTTAG GCCACCACTT
6351 CAAGAACTCT GTAGCACCGC CTACATACCT CGCTCTGCTA ATCCTGTTAC
6401 CAGTGGCTGC TGCCAGTGGC GATAAGTCGT GTCTTACCGG GTTGGACTCA
6451 AGACGATAGT TACCGGATAA GGCGCAGCGG TCGGGCTGAA CGGGGGGTTC
6501 GTGCACACAG CCCAGCTTGG AGCGAACGAC CTACACCGAA CTGAGATACC
6551 TACAGCGTGA GCTATGAGAA AGCGCCACGC TTCCCGAAGG GAGAAAGGCG
6601 GACAGGTATC CGGTAAGCGG CAGGGTCGGA ACAGGAGAGC GCACGAGGGA
6651 GCTTCCAGGG GGAAACGCCT GGTATCTTTA TAGTCCTGTC GGGTTTCGCC
6701 ACCTCTGACT TGAGCGTCGA TTTTTGTGAT GCTCGTCAGG GGGGCGGAGC
6751 CTATGGAAAA ACGCCAGCAA CGCGGCCTTT TTACGGTTCC TGGCCTTTTG
6801 CTGGCCTTTT GCTCACATGT
AAVC-Syn-mBPIP-TATκ28-eGFP
L-ITR: 1-141
Syn-1 promoter: 159-730
Bip-TATκ28-EGFP: 754-1659
bGHp(A): 1684-1911
R-ITR: 1923-2063
Amp(R): 2980-3837
pUC origin: 3988-4655
SEQ ID NO: 120
      1 CCTGCAGGCA GCTGCGCGCT CGCTCGCTCA CTGAGGCCGC CCGGGCAAAG
    51 CCCGGGCGTC GGGCGACCTT TGGTCGCCCG GCCTCAGTGA GCGAGCGAGC
  101 GCGCAGAGAG GGAGTGGCCA ACTCCATCAC TAGGGGTTCC TGCGGCCTAA
  151 GGCAATTGAC TACAAACCGA GTATCTGCAG AGGGCCCTGC GTATGAGTGC
  201 AAGTGGGTTT TAGGACCAGG ATGAGGCGGG GTGGGGGTGC CTACCTGACG
  251 ACCGACCCCG ACCCACTGGA CAAGCACCCA ACCCCCATTC CCCAAATTGC
  301 GCATCCCCTA TCAGAGAGGG GGAGGGGAAA CAGGATGCGG CGAGGCGCGT
  351 GCGCACTGCC AGCTTCAGCA CCGCGGACAG TGCCTTCGCC CCCGCCTGGC
  401 GGCGCGCGCC ACCGCCGCCT CAGCACTGAA GGCGCGCTGA CGTCACTCGC
  451 CGGTCCCCCG CAAACTCCCC TTCCCGGCCA CCTTGGTCGC GTCCGCGCCG
  501 CCGCCGGCCC AGCCGGACCG CACCACGCGA GGCGCGAGAT AGGGGGGCAC
  551 GGGCGCGACC ATCTGCGCTG CGGCGCCGGC GACTCAGCGC TGCCTCAGTC
  601 TGCGGTGGGC AGCGGAGGAG TCGTGTCGTG CCTGAGAGCG CAGCTGTGCT
  651 CCTGGGCACC GCGCAGTCCG CCCCCGCGGC TCCTGGCCAG ACCACCCCTA
  701 GGACCCCCTG CCCCAAGTCG CAGCCTTCGA GCTAGCCAAA GCTTGCCGCC
  751 ACCATGAAAC TGTCCCTGGT CGCCGCCATG CTGCTCCTCC TGTCACTGGT
  801 CGCCGCTATG CTGCTCCTCC TCTCCGCTGC TCGGGCTGGG GACGCTGCTC
  851 AGCCAGCTAG GAGAGCTAGG AGGACCAAGC TGGCTGCTTA CGCTAGGAAG
  901 GCTGCTAGGC AGGCTAGAGC TGGAGGAGGC GGATCTATGG TGAGCAAGGG
  951 AGAGGAGCTG TTCACAGGCG TGGTGCCCAT CCTGGTGGAG CTGGACGGAG
1001 ATGTGAACGG CCACAAGTTT AGCGTGTCCG GAGAGGGAGA GGGCGACGCT
1051 ACCTACGGAA AGCTGACACT GAAGTTCATC TGCACCACAG GCAAGCTGCC
1101 CGTGCCTTGG CCAACCCTGG TGACCACACT GACATACGGC GTGCAGTGTT
1151 TTTCCAGGTA CCCAGACCAC ATGAAGCAGC ACGATTTCTT TAAGTCTGCC
1201 ATGCCCGAGG GATACGTGCA GGAGCGGACC ATCTTCTTTA AGGACGATGG
1251 CAACTACAAG ACCCGCGCTG AGGTGAAGTT CGAGGGAGAC ACACTGGTGA
1301 ACAGGATCGA GCTGAAGGGC ATCGACTTTA AGGAGGATGG AAACATCCTG
1351 GGCCACAAGC TGGAGTACAA CTACAACAGC CACAACGTGT ACATCATGGC
1401 CGATAAGCAG AAGAACGGAA TCAAGGTGAA CTTCAAGATC AGACACAACA
1451 TCGAGGACGG CTCCGTGCAG CTGGCTGATC ACTACCAGCA GAACACCCCT
1501 ATCGGAGACG GACCCGTGCT GCTGCCTGAT AACCACTACC TGTCCACACA
1551 GTCTGCCCTG AGCAAGGACC CAAACGAGAA GCGGGATCAC ATGGTGCTGC
1601 TGGAATTTGT GACTGCTGCT GGTATTACAC TGGGTATGGA TGAACTCTAT
1651 AAATGATAAG CGGCCGCAAC TCGAGACTCT AGACGACTGT GCCTTCTAGT
1701 TGCCAGCCAT CTGTTGTTTG CCCCTCCCCC GTGCCTTCCT TGACCCTGGA
1751 AGGTGCCACT CCCACTGTCC TTTCCTAATA AAATGAGGAA ATTGCATCGC
1801 ATTGTCTGAG TAGGTGTCAT TCTATTCTGG GGGGTGGGGT GGGGCAGGAC
1851 AGCAAGGGGG AGGATTGGGA AGACAATAGC AGGCATGCTG GGGATGCGGT
1901 GGGCTCTATG GCCGCGGGCC GCAGGAACCC CTAGTGATGG AGTTGGCCAC
1951 TCCCTCTCTG CGCGCTCGCT CGCTCACTGA GGCCGGGCGA CCAAAGGTCG
2001 CCCGACGCCC GGGCTTTGCC CGGGCGGCCT CAGTGAGCGA GCGAGCGCGC
2051 AGCTGCCTGC AGGGGCGCCT GATGCGGTAT TTTCTCCTTA CGCATCTGTG
2101 CGGTATTTCA CACCGCATAC GTCAAAGCAA CCATAGTACG CGCCCTGTAG
2151 CGGCGCATTA AGCGCGGCGG GTGTGGTGGT TACGCGCAGC GTGACCGCTA
2201 CACTTGCCAG CGCCCTAGCG CCCGCTCCTT TCGCTTTCTT CCCTTCCTTT
2251 CTCGCCACGT TCGCCGGCTT TCCCCGTCAA GCTCTAAATC GGGGGCTCCC
2301 TTTAGGGTTC CGATTTAGTG CTTTACGGCA CCTCGACCCC AAAAAACTTG
2351 ATTTGGGTGA TGGTTCACGT AGTGGGCCAT CGCCCTGATA GACGGTTTTT
2401 CGCCCTTTGA CGTTGGAGTC CACGTTCTTT AATAGTGGAC TCTTGTTCCA
2451 AACTGGAACA ACACTCAACC CTATCTCGGG CTATTCTTTT GATTTATAAG
2501 GGATTTTGCC GATTTCGGCC TATTGGTTAA AAAATGAGCT GATTTAACAA
2551 AAATTTAACG CGAATTTTAA CAAAATATTA ACGTTTACAA TTTTATGGTG
2601 CACTCTCAGT ACAATCTGCT CTGATGCCGC ATAGTTAAGC CAGCCCCGAC
2651 ACCCGCCAAC ACCCGCTGAC GCGCCCTGAC GGGCTTGTCT GCTCCCGGCA
2701 TCCGCTTACA GACAAGCTGT GACCGTCTCC GGGAGCTGCA TGTGTCAGAG
2751 GTTTTCACCG TCATCACCGA AACGCGCGAG ACGAAAGGGC CTCGTGATAC
2801 GCCTATTTTT ATAGGTTAAT GTCATGATAA TAATGGTTTC TTAGACGTCA
2851 GGTGGCACTT TTCGGGGAAA TGTGCGCGGA ACCCCTATTT GTTTATTTTT
2901 CTAAATACAT TCAAATATGT ATCCGCTCAT GAGACAATAA CCCTGATAAA
2951 TGCTTCAATA ATATTGAAAA AGGAAGAGTA TGAGTATTCA ACATTTCCGT
3001 GTCGCCCTTA TTCCCTTTTT TGCGGCATTT TGCCTTCCTG TTTTTGCTCA
3051 CCCAGAAACG CTGGTGAAAG TAAAAGATGC TGAAGATCAG TTGGGTGCAC
3101 GAGTGGGTTA CATCGAACTG GATCTCAACA GCGGTAAGAT CCTTGAGAGT
3151 TTTCGCCCCG AAGAACGTTT TCCAATGATG AGCACTTTTA AAGTTCTGCT
3201 ATGTGGCGCG GTATTATCCC GTATTGACGC CGGGCAAGAG CAACTCGGTC
3251 GCCGCATACA CTATTCTCAG AATGACTTGG TTGAGTACTC ACCAGTCACA
3301 GAAAAGCATC TTACGGATGG CATGACAGTA AGAGAATTAT GCAGTGCTGC
3351 CATAACCATG AGTGATAACA CTGCGGCCAA CTTACTTCTG ACAACGATCG
3401 GAGGACCGAA GGAGCTAACC GCTTTTTTGC ACAACATGGG GGATCATGTA
3451 ACTCGCCTTG ATCGTTGGGA ACCGGAGCTG AATGAAGCCA TACCAAACGA
3501 CGAGCGTGAC ACCACGATGC CTGTAGCAAT GGCAACAACG TTGCGCAAAC
3551 TATTAACTGG CGAACTACTT ACTCTAGCTT CCCGGCAACA ATTAATAGAC
3601 TGGATGGAGG CGGATAAAGT TGCAGGACCA CTTCTGCGCT CGGCCCTTCC
3651 GGCTGGCTGG TTTATTGCTG ATAAATCTGG AGCCGGTGAG CGTGGGTCTC
3701 GCGGTATCAT TGCAGCACTG GGGCCAGATG GTAAGCCCTC CCGTATCGTA
3751 GTTATCTACA CGACGGGGAG TCAGGCAACT ATGGATGAAC GAAATAGACA
3801 GATCGCTGAG ATAGGTGCCT CACTGATTAA GCATTGGTAA CTGTCAGACC
3851 AAGTTTACTC ATATATACTT TAGATTGATT TAAAACTTCA TTTTTAATTT
3901 AAAAGGATCT AGGTGAAGAT CCTTTTTGAT AATCTCATGA CCAAAATCCC
3951 TTAACGTGAG TTTTCGTTCC ACTGAGCGTC AGACCCCGTA GAAAAGATCA
4001 AAGGATCTTC TTGAGATCCT TTTTTTCTGC GCGTAATCTG CTGCTTGCAA
4051 ACAAAAAAAC CACCGCTACC AGCGGTGGTT TGTTTGCCGG ATCAAGAGCT
4101 ACCAACTCTT TTTCCGAAGG TAACTGGCTT CAGCAGAGCG CAGATACCAA
4151 ATACTGTCCT TCTAGTGTAG CCGTAGTTAG GCCACCACTT CAAGAACTCT
4201 GTAGCACCGC CTACATACCT CGCTCTGCTA ATCCTGTTAC CAGTGGCTGC
4251 TGCCAGTGGC GATAAGTCGT GTCTTACCGG GTTGGACTCA AGACGATAGT
4301 TACCGGATAA GGCGCAGCGG TCGGGCTGAA CGGGGGGTTC GTGCACACAG
4351 CCCAGCTTGG AGCGAACGAC CTACACCGAA CTGAGATACC TACAGCGTGA
4401 GCTATGAGAA AGCGCCACGC TTCCCGAAGG GAGAAAGGCG GACAGGTATC
4451 CGGTAAGCGG CAGGGTCGGA ACAGGAGAGC GCACGAGGGA GCTTCCAGGG
4501 GGAAACGCCT GGTATCTTTA TAGTCCTGTC GGGTTTCGCC ACCTCTGACT
4551 TGAGCGTCGA TTTTTGTGAT GCTCGTCAGG GGGGCGGAGC CTATGGAAAA
4601 ACGCCAGCAA CGCGGCCTTT TTACGGTTCC TGGCCTTTTG CTGGCCTTTT
4651 GCTCACATGT
AAVC-Syn- mBPIP-TATκ28-NLS-eGFP
L-ITR: 1-141
Syn-1 promoter: 159-730
Bip-TATκ28-NLS-eGFP: 754-1719
bGHp(A): 1744-1971
R-ITR: 1983-2123
Amp(R): 3040-3897
pUC origin: 4048-4715
SEQ ID NO: 121
      1 CCTGCAGGCA GCTGCGCGCT CGCTCGCTCA CTGAGGCCGC CCGGGCAAAG
    51 CCCGGGCGTC GGGCGACCTT TGGTCGCCCG GCCTCAGTGA GCGAGCGAGC
  101 GCGCAGAGAG GGAGTGGCCA ACTCCATCAC TAGGGGTTCC TGCGGCCTAA
  151 GGCAATTGAC TACAAACCGA GTATCTGCAG AGGGCCCTGC GTATGAGTGC
  201 AAGTGGGTTT TAGGACCAGG ATGAGGCGGG GTGGGGGTGC CTACCTGACG
  251 ACCGACCCCG ACCCACTGGA CAAGCACCCA ACCCCCATTC CCCAAATTGC
  301 GCATCCCCTA TCAGAGAGGG GGAGGGGAAA CAGGATGCGG CGAGGCGCGT
  351 GCGCACTGCC AGCTTCAGCA CCGCGGACAG TGCCTTCGCC CCCGCCTGGC
  401 GGCGCGCGCC ACCGCCGCCT CAGCACTGAA GGCGCGCTGA CGTCACTCGC
  451 CGGTCCCCCG CAAACTCCCC TTCCCGGCCA CCTTGGTCGC GTCCGCGCCG
  501 CCGCCGGCCC AGCCGGACCG CACCACGCGA GGCGCGAGAT AGGGGGGCAC
  551 GGGCGCGACC ATCTGCGCTG CGGCGCCGGC GACTCAGCGC TGCCTCAGTC
  601 TGCGGTGGGC AGCGGAGGAG TCGTGTCGTG CCTGAGAGCG CAGCTGTGCT
  651 CCTGGGCACC GCGCAGTCCG CCCCCGCGGC TCCTGGCCAG ACCACCCCTA
  701 GGACCCCCTG CCCCAAGTCG CAGCCTTCGA GCTAGCCAAA GCTTGCCGCC
  751 ACCATGAAAC TCAGTCTGGT CGCCGCTATG CTCCTGCTCC TCTCCCTGGT
  801 CGCCGCTATG CTCCTGCTCC TGTCTGCTGC CCGCGCTGGG GACGCTGCTC
  851 AGCCAGCTAG GAGAGCTAGG AGGACCAAGC TGGCTGCTTA CGCTAGAAAG
  901 GCTGCTAGGC AGGCTAGAGC TGGAGGAGGA GGATCCATGG CTCCCAAGAA
  951 GAAGAGGAAG GTGCGCTACC CCGCCTTCCT GTACAAGGTG GCTACCATGG
1001 TGTCTAAGGG AGAGGAGCTG TTTACAGGCG TGGTGCCCAT CCTGGTGGAG
1051 CTGGACGGAG ATGTGAACGG CCACAAGTTC AGCGTGTCCG GAGAGGGAGA
1101 GGGCGACGCC ACCTACGGAA AGCTGACACT GAAGTTTATC TGCACCACAG
1151 GCAAGCTGCC CGTGCCTTGG CCAACCCTGG TGACCACACT GACATACGGC
1201 GTGCAGTGTT TCTCTCGGTA CCCTGACCAC ATGAAGCAGC ACGATTTCTT
1251 TAAGAGCGCC ATGCCAGAGG GATACGTGCA GGAGAGGACA ATCTTCTTTA
1301 AGGACGATGG CAACTACAAG ACCAGAGCTG AGGTGAAGTT CGAGGGAGAC
1351 ACACTGGTGA ACCGGATCGA GCTGAAGGGC ATCGACTTTA AGGAGGATGG
1401 AAACATCCTG GGCCACAAGC TGGAGTACAA CTACAACAGC CACAACGTGT
1451 ACATCATGGC CGATAAGCAG AAGAACGGAA TCAAGGTGAA CTTTAAGATC
1501 CGCCACAACA TCGAGGACGG CTCCGTGCAG CTGGCTGATC ACTACCAGCA
1551 GAACACCCCA ATCGGAGACG GACCCGTGCT GCTGCCTGAT AACCACTACC
1601 TGTCTACACA GAGCGCCCTG TCCAAGGACC CTAACGAGAA GAGGGATCAC
1651 ATGGTCCTCC TGGAATTTGT GACTGCTGCT GGGATTACTC TCGGTATGGA
1701 TGAACTGTAT AAATGATAAG CGGCCGCAAC TCGAGACTCT AGACGACTGT
1751 GCCTTCTAGT TGCCAGCCAT CTGTTGTTTG CCCCTCCCCC GTGCCTTCCT
1801 TGACCCTGGA AGGTGCCACT CCCACTGTCC TTTCCTAATA AAATGAGGAA
1851 ATTGCATCGC ATTGTCTGAG TAGGTGTCAT TCTATTCTGG GGGGTGGGGT
1901 GGGGCAGGAC AGCAAGGGGG AGGATTGGGA AGACAATAGC AGGCATGCTG
1951 GGGATGCGGT GGGCTCTATG GCCGCGGGCC GCAGGAACCC CTAGTGATGG
2001 AGTTGGCCAC TCCCTCTCTG CGCGCTCGCT CGCTCACTGA GGCCGGGCGA
2051 CCAAAGGTCG CCCGACGCCC GGGCTTTGCC CGGGCGGCCT CAGTGAGCGA
2101 GCGAGCGCGC AGCTGCCTGC AGGGGCGCCT GATGCGGTAT TTTCTCCTTA
2151 CGCATCTGTG CGGTATTTCA CACCGCATAC GTCAAAGCAA CCATAGTACG
2201 CGCCCTGTAG CGGCGCATTA AGCGCGGCGG GTGTGGTGGT TACGCGCAGC
2251 GTGACCGCTA CACTTGCCAG CGCCCTAGCG CCCGCTCCTT TCGCTTTCTT
2301 CCCTTCCTTT CTCGCCACGT TCGCCGGCTT TCCCCGTCAA GCTCTAAATC
2351 GGGGGCTCCC TTTAGGGTTC CGATTTAGTG CTTTACGGCA CCTCGACCCC
2401 AAAAAACTTG ATTTGGGTGA TGGTTCACGT AGTGGGCCAT CGCCCTGATA
2451 GACGGTTTTT CGCCCTTTGA CGTTGGAGTC CACGTTCTTT AATAGTGGAC
2501 TCTTGTTCCA AACTGGAACA ACACTCAACC CTATCTCGGG CTATTCTTTT
2551 GATTTATAAG GGATTTTGCC GATTTCGGCC TATTGGTTAA AAAATGAGCT
2601 GATTTAACAA AAATTTAACG CGAATTTTAA CAAAATATTA ACGTTTACAA
2651 TTTTATGGTG CACTCTCAGT ACAATCTGCT CTGATGCCGC ATAGTTAAGC
2701 CAGCCCCGAC ACCCGCCAAC ACCCGCTGAC GCGCCCTGAC GGGCTTGTCT
2751 GCTCCCGGCA TCCGCTTACA GACAAGCTGT GACCGTCTCC GGGAGCTGCA
2801 TGTGTCAGAG GTTTTCACCG TCATCACCGA AACGCGCGAG ACGAAAGGGC
2851 CTCGTGATAC GCCTATTTTT ATAGGTTAAT GTCATGATAA TAATGGTTTC
2901 TTAGACGTCA GGTGGCACTT TTCGGGGAAA TGTGCGCGGA ACCCCTATTT
2951 GTTTATTTTT CTAAATACAT TCAAATATGT ATCCGCTCAT GAGACAATAA
3001 CCCTGATAAA TGCTTCAATA ATATTGAAAA AGGAAGAGTA TGAGTATTCA
3051 ACATTTCCGT GTCGCCCTTA TTCCCTTTTT TGCGGCATTT TGCCTTCCTG
3101 TTTTTGCTCA CCCAGAAACG CTGGTGAAAG TAAAAGATGC TGAAGATCAG
3151 TTGGGTGCAC GAGTGGGTTA CATCGAACTG GATCTCAACA GCGGTAAGAT
3201 CCTTGAGAGT TTTCGCCCCG AAGAACGTTT TCCAATGATG AGCACTTTTA
3251 AAGTTCTGCT ATGTGGCGCG GTATTATCCC GTATTGACGC CGGGCAAGAG
3301 CAACTCGGTC GCCGCATACA CTATTCTCAG AATGACTTGG TTGAGTACTC
3351 ACCAGTCACA GAAAAGCATC TTACGGATGG CATGACAGTA AGAGAATTAT
3401 GCAGTGCTGC CATAACCATG AGTGATAACA CTGCGGCCAA CTTACTTCTG
3451 ACAACGATCG GAGGACCGAA GGAGCTAACC GCTTTTTTGC ACAACATGGG
3501 GGATCATGTA ACTCGCCTTG ATCGTTGGGA ACCGGAGCTG AATGAAGCCA
3551 TACCAAACGA CGAGCGTGAC ACCACGATGC CTGTAGCAAT GGCAACAACG
3601 TTGCGCAAAC TATTAACTGG CGAACTACTT ACTCTAGCTT CCCGGCAACA
3651 ATTAATAGAC TGGATGGAGG CGGATAAAGT TGCAGGACCA CTTCTGCGCT
3701 CGGCCCTTCC GGCTGGCTGG TTTATTGCTG ATAAATCTGG AGCCGGTGAG
3751 CGTGGGTCTC GCGGTATCAT TGCAGCACTG GGGCCAGATG GTAAGCCCTC
3801 CCGTATCGTA GTTATCTACA CGACGGGGAG TCAGGCAACT ATGGATGAAC
3851 GAAATAGACA GATCGCTGAG ATAGGTGCCT CACTGATTAA GCATTGGTAA
3901 CTGTCAGACC AAGTTTACTC ATATATACTT TAGATTGATT TAAAACTTCA
3951 TTTTTAATTT AAAAGGATCT AGGTGAAGAT CCTTTTTGAT AATCTCATGA
4001 CCAAAATCCC TTAACGTGAG TTTTCGTTCC ACTGAGCGTC AGACCCCGTA
4051 GAAAAGATCA AAGGATCTTC TTGAGATCCT TTTTTTCTGC GCGTAATCTG
4101 CTGCTTGCAA ACAAAAAAAC CACCGCTACC AGCGGTGGTT TGTTTGCCGG
4151 ATCAAGAGCT ACCAACTCTT TTTCCGAAGG TAACTGGCTT CAGCAGAGCG
4201 CAGATACCAA ATACTGTCCT TCTAGTGTAG CCGTAGTTAG GCCACCACTT
4251 CAAGAACTCT GTAGCACCGC CTACATACCT CGCTCTGCTA ATCCTGTTAC
4301 CAGTGGCTGC TGCCAGTGGC GATAAGTCGT GTCTTACCGG GTTGGACTCA
4351 AGACGATAGT TACCGGATAA GGCGCAGCGG TCGGGCTGAA CGGGGGGTTC
4401 GTGCACACAG CCCAGCTTGG AGCGAACGAC CTACACCGAA CTGAGATACC
4451 TACAGCGTGA GCTATGAGAA AGCGCCACGC TTCCCGAAGG GAGAAAGGCG
4501 GACAGGTATC CGGTAAGCGG CAGGGTCGGA ACAGGAGAGC GCACGAGGGA
4551 GCTTCCAGGG GGAAACGCCT GGTATCTTTA TAGTCCTGTC GGGTTTCGCC
4601 ACCTCTGACT TGAGCGTCGA TTTTTGTGAT GCTCGTCAGG GGGGCGGAGC
4651 CTATGGAAAA ACGCCAGCAA CGCGGCCTTT TTACGGTTCC TGGCCTTTTG
4701 CTGGCCTTTT GCTCACATGT
DNA sequence for mBPIP-TATκ28-CDKL5-107 (human optimized)
SEQ ID NO: 122
ATGAAGCTGTCCCTGGTGGCCGCTATGCTGCTGCTGCTGTCTCTGGTCGCTGCCATGTTATTA
CTGCTGTCTGCCGCTAGGGCCGGGGACGCAGCACAGCCCGCAAGAAGAGCAAGAAGAACTAAA
CTGGCCGCTTACGCAAGGAAGGCAGCAAGACAGGCAAGAGCAGGCGGCGGCGGCTCCAAGATC
CCCAATATCGGCAACGTGATGAATAAGTTCGAGATCCTGGGAGTGGTGGGAGAGGGAGCCTAC
GGCGTGGTGCTGAAGTGCAGACACAAGGAGACACACGAGATCGTGGCCATCAAGAAGTTTAAG
GACAGCGAGGAGAATGAGGAGGTGAAGGAGACAACCCTGCGCGAGCTGAAGATGCTGCGGACA
CTGAAGCAGGAGAACATCGTGGAGCTGAAGGAGGCCTTCCGGAGAAGGGGCAAGCTGTACCTG
GTGTTTGAGTATGTGGAGAAGAACATGCTGGAGCTGCTGGAGGAGATGCCTAATGGCGTGCCC
CCTGAGAAGGTGAAGTCCTACATCTATCAGCTGATCAAGGCCATCCACTGGTGCCACAAGAAC
GATATCGTGCACCGCGACATCAAGCCCGAGAACCTGCTGATCTCCCACAATGACGTGCTGAAG
CTGTGCGACTTCGGCTTTGCCCGGAACCTGAGCGAGGGCAACAATGCCAATTACACAGAGTAT
GTGGCCACCCGCTGGTACAGAAGCCCCGAGCTGCTGCTGGGCGCCCCCTATGGCAAGAGCGTG
GATATGTGGTCCGTGGGCTGCATCCTGGGCGAGCTGTCTGATGGCCAGCCTCTGTTCCCAGGC
GAGAGCGAGATCGACCAGCTGTTTACCATCCAGAAGGTGCTGGGCCCTCTGCCAAGCGAGCAG
ATGAAGCTGTTCTACTCCAACCCAAGGTTCCACGGCCTGAGGTTTCCAGCCGTGAATCACCCT
CAGAGCCTGGAGCGCCGGTATCTGGGCATCCTGAACTCCGTGCTGCTGGACCTGATGAAGAAC
CTGCTGAAGCTGGACCCCGCCGACAGATACCTGACCGAGCAGTGTCTGAATCACCCTACATTT
CAGACCCAGAGACTGCTGGATAGGAGCCCTTCCCGCTCTGCCAAGCGGAAGCCATATCACGTG
GAGAGCAGCACCCTGTCCAATCGCAACCAGGCCGGCAAGTCTACAGCCCTGCAGAGCCACCAC
CGGAGCAACTCCAAGGATATCCAGAATCTGTCCGTGGGCCTGCCTAGGGCCGACGAGGGCCTG
CCAGCAAACGAGAGCTTCCTGAATGGAAACCTGGCAGGAGCCTCTCTGAGCCCACTGCACACA
AAGACCTACCAGGCCTCTAGCCAGCCCGGCTCCACATCTAAGGACCTGACCAACAATAACATC
CCACACCTGCTGTCTCCCAAGGAGGCCAAGAGCAAGACCGAGTTCGACTTCAACATCGACCCA
AAGCCTAGCGAGGGACCTGGCACAAAGTATCTGAAGAGCAACAGCCGGAGCCAGCAGAATAGG
CACTCCTTCATGGAGTCCTCTCAGTCTAAGGCCGGCACCCTGCAGCCAAACGAGAAGCAGAGC
AGGCACTCCTACATCGACACCATCCCACAGAGCAGCCGGAGCCCCTCCTATCGGACAAAGGCC
AAGTCTCACGGCGCCCTGTCTGATAGCAAGTCCGTGTCTAATCTGAGCGAGGCCAGAGCCCAG
ATCGCAGAGCCCAGCACCTCCAGGTACTTTCCTTCTAGCTGTCTGGATCTGAACTCTCCTACA
AGCCCAACACCCACCAGACACAGCGACACAAGGACCCTGCTGTCTCCAAGCGGCAGAAATAAC
AGGAACGAGGGCACCCTGGACAGCCGGCGGACCACAACCAGGCACAGCAAGACAATGGAGGAG
CTGAAGCTGCCAGAGCACATGGATTCCTCTCACTCCCACTCTCTGAGCGCCCCCCACGAGTCC
TTCTCTTACGGCCTGGGCTATACCTCCCCCTTCAGCAGCCAGCAGCGCCCCCACCGGCACTCT
ATGTACGTGACAAGAGATAAGGTGAGGGCAAAGGGCCTGGACGGCAGCCTGTCCATCGGACAG
GGAATGGCAGCCCGGGCCAACTCCCTGCAGCTGCTGTCTCCTCAGCCAGGAGAGCAGCTGCCA
CCAGAGATGACCGTGGCACGGAGCAGCGTGAAGGAGACAAGCAGGGAGGGCACCTCCTCTTTC
CACACAAGACAGAAGTCCGAGGGCGGCGTGTATCACGATCCCCACTCTGACGATGGCACAGCC
CCTAAGGAGAACAGGCACCTGTACAATGACCCCGTGCCTAGGAGGGTGGGCTCCTTCTATCGC
GTGCCATCTCCCCGGCCTGATAATAGCTTTCACGAGAATAACGTGAGCACCCGGGTGAGCAGC
CTGCCATCTGAGTCTAGCTCCGGCACAAACCACTCTAAGAGGCAGCCCGCCTTTGACCCTTGG
AAGAGCCCAGAGAATATCTCTCACAGCGAGCAGCTGAAGGAGAAGGAGAAGCAGGGCTTCTTT
CGCAGCATGAAGAAGAAGAAGAAGAAGAGCCAGACCGTGCCTAACTCCGATTCTCCAGACCTG
CTGACCCTGCAGAAGTCCATCCACAGCGCCTCCACACCCTCTAGCAGACCTAAGGAGTGGAGG
CCTGAGAAGATCAGCGACCTGCAGACCCAGAGCCAGCCACTGAAGTCCCTGCGGAAGCTGCTG
CACCTGTCCTCTGCCAGCAACCACCCAGCCAGCTCCGATCCAAGGTTCCAGCCCCTGACAGCC
CAGCAGACCAAGAACAGCTTCAGCGAGATCAGAATCCACCCTCTGTCCCAGGCCTCTGGAGGC
TCTAGCAACATCAGGCAGGAGCCAGCACCAAAGGGCCGGCCCGCCCTGCAGCTGCCTGGCCAG
ATGGACCCAGGCTGGCACGTGTCCTCTGTGACAAGATCCGCCACCGAGGGCCCATCCTACTCT
GAGCAGCTGGGAGCAAAGAGCGGACCTAATGGACACCCATATAACAGGACCAATAGATCCAGG
ATGCCCAATCTGAACGATCTGAAGGAGACAGCCCTGTGA
DNA sequence for CDKL5-107 (human optimized)
SEQ ID NO: 123
AAGATCCCCAATATCGGCAACGTGATGAATAAGTTCGAGATCCTGGGAGTGGTGGGAGAGGGA
GCCTACGGCGTGGTGCTGAAGTGCAGACACAAGGAGACACACGAGATCGTGGCCATCAAGAAG
TTTAAGGACAGCGAGGAGAATGAGGAGGTGAAGGAGACAACCCTGCGCGAGCTGAAGATGCTG
CGGACACTGAAGCAGGAGAACATCGTGGAGCTGAAGGAGGCCTTCCGGAGAAGGGGCAAGCTG
TACCTGGTGTTTGAGTATGTGGAGAAGAACATGCTGGAGCTGCTGGAGGAGATGCCTAATGGC
GTGCCCCCTGAGAAGGTGAAGTCCTACATCTATCAGCTGATCAAGGCCATCCACTGGTGCCAC
AAGAACGATATCGTGCACCGCGACATCAAGCCCGAGAACCTGCTGATCTCCCACAATGACGTG
CTGAAGCTGTGCGACTTCGGCTTTGCCCGGAACCTGAGCGAGGGCAACAATGCCAATTACACA
GAGTATGTGGCCACCCGCTGGTACAGAAGCCCCGAGCTGCTGCTGGGCGCCCCCTATGGCAAG
AGCGTGGATATGTGGTCCGTGGGCTGCATCCTGGGCGAGCTGTCTGATGGCCAGCCTCTGTTC
CCAGGCGAGAGCGAGATCGACCAGCTGTTTACCATCCAGAAGGTGCTGGGCCCTCTGCCAAGC
GAGCAGATGAAGCTGTTCTACTCCAACCCAAGGTTCCACGGCCTGAGGTTTCCAGCCGTGAAT
CACCCTCAGAGCCTGGAGCGCCGGTATCTGGGCATCCTGAACTCCGTGCTGCTGGACCTGATG
AAGAACCTGCTGAAGCTGGACCCCGCCGACAGATACCTGACCGAGCAGTGTCTGAATCACCCT
ACATTTCAGACCCAGAGACTGCTGGATAGGAGCCCTTCCCGCTCTGCCAAGCGGAAGCCATAT
CACGTGGAGAGCAGCACCCTGTCCAATCGCAACCAGGCCGGCAAGTCTACAGCCCTGCAGAGC
CACCACCGGAGCAACTCCAAGGATATCCAGAATCTGTCCGTGGGCCTGCCTAGGGCCGACGAG
GGCCTGCCAGCAAACGAGAGCTTCCTGAATGGAAACCTGGCAGGAGCCTCTCTGAGCCCACTG
CACACAAAGACCTACCAGGCCTCTAGCCAGCCCGGCTCCACATCTAAGGACCTGACCAACAAT
AACATCCCACACCTGCTGTCTCCCAAGGAGGCCAAGAGCAAGACCGAGTTCGACTTCAACATC
GACCCAAAGCCTAGCGAGGGACCTGGCACAAAGTATCTGAAGAGCAACAGCCGGAGCCAGCAG
AATAGGCACTCCTTCATGGAGTCCTCTCAGTCTAAGGCCGGCACCCTGCAGCCAAACGAGAAG
CAGAGCAGGCACTCCTACATCGACACCATCCCACAGAGCAGCCGGAGCCCCTCCTATCGGACA
AAGGCCAAGTCTCACGGCGCCCTGTCTGATAGCAAGTCCGTGTCTAATCTGAGCGAGGCCAGA
GCCCAGATCGCAGAGCCCAGCACCTCCAGGTACTTTCCTTCTAGCTGTCTGGATCTGAACTCT
CCTACAAGCCCAACACCCACCAGACACAGCGACACAAGGACCCTGCTGTCTCCAAGCGGCAGA
AATAACAGGAACGAGGGCACCCTGGACAGCCGGCGGACCACAACCAGGCACAGCAAGACAATG
GAGGAGCTGAAGCTGCCAGAGCACATGGATTCCTCTCACTCCCACTCTCTGAGCGCCCCCCAC
GAGTCCTTCTCTTACGGCCTGGGCTATACCTCCCCCTTCAGCAGCCAGCAGCGCCCCCACCGG
CACTCTATGTACGTGACAAGAGATAAGGTGAGGGCAAAGGGCCTGGACGGCAGCCTGTCCATC
GGACAGGGAATGGCAGCCCGGGCCAACTCCCTGCAGCTGCTGTCTCCTCAGCCAGGAGAGCAG
CTGCCACCAGAGATGACCGTGGCACGGAGCAGCGTGAAGGAGACAAGCAGGGAGGGCACCTCC
TCTTTCCACACAAGACAGAAGTCCGAGGGCGGCGTGTATCACGATCCCCACTCTGACGATGGC
ACAGCCCCTAAGGAGAACAGGCACCTGTACAATGACCCCGTGCCTAGGAGGGTGGGCTCCTTC
TATCGCGTGCCATCTCCCCGGCCTGATAATAGCTTTCACGAGAATAACGTGAGCACCCGGGTG
AGCAGCCTGCCATCTGAGTCTAGCTCCGGCACAAACCACTCTAAGAGGCAGCCCGCCTTTGAC
CCTTGGAAGAGCCCAGAGAATATCTCTCACAGCGAGCAGCTGAAGGAGAAGGAGAAGCAGGGC
TTCTTTCGCAGCATGAAGAAGAAGAAGAAGAAGAGCCAGACCGTGCCTAACTCCGATTCTCCA
GACCTGCTGACCCTGCAGAAGTCCATCCACAGCGCCTCCACACCCTCTAGCAGACCTAAGGAG
TGGAGGCCTGAGAAGATCAGCGACCTGCAGACCCAGAGCCAGCCACTGAAGTCCCTGCGGAAG
CTGCTGCACCTGTCCTCTGCCAGCAACCACCCAGCCAGCTCCGATCCAAGGTTCCAGCCCCTG
ACAGCCCAGCAGACCAAGAACAGCTTCAGCGAGATCAGAATCCACCCTCTGTCCCAGGCCTCT
GGAGGCTCTAGCAACATCAGGCAGGAGCCAGCACCAAAGGGCCGGCCCGCCCTGCAGCTGCCT
GGCCAGATGGACCCAGGCTGGCACGTGTCCTCTGTGACAAGATCCGCCACCGAGGGCCCATCC
TACTCTGAGCAGCTGGGAGCAAAGAGCGGACCTAATGGACACCCATATAACAGGACCAATAGA
TCCAGGATGCCCAATCTGAACGATCTGAAGGAGACAGCCCTG
DNA sequence for MBIP-TATκ28-CDKL5_107-FH [1-7NQ]
(human optimized)
SEQ ID NO: 124
ATGAAGCTGTCCCTGGTGGCCGCTATGCTGCTGCTGCTGTCTCTGGTCGCTGCCATGTTATTA
CTGCTGTCTGCCGCTAGGGCCGGGGACGCAGCACAGCCCGCAAGAAGAGCAAGAAGAACTAAA
CTGGCCGCTTACGCAAGGAAGGCAGCAAGACAGGCAAGAGCAGGCGGCGGCGGCTCCAAGATC
CCCAATATCGGCAACGTGATGAATAAGTTCGAGATCCTGGGAGTGGTGGGAGAGGGAGCCTAC
GGCGTGGTGCTGAAGTGCAGACACAAGGAGACACACGAGATCGTGGCCATCAAGAAGTTTAAG
GACAGCGAGGAGAATGAGGAGGTGAAGGAGACAACCCTGCGCGAGCTGAAGATGCTGCGGACA
CTGAAGCAGGAGAACATCGTGGAGCTGAAGGAGGCCTTCCGGAGAAGGGGCAAGCTGTACCTG
GTGTTTGAGTATGTGGAGAAGAACATGCTGGAGCTGCTGGAGGAGATGCCTAATGGCGTGCCC
CCTGAGAAGGTGAAGTCCTACATCTATCAGCTGATCAAGGCCATCCACTGGTGCCACAAGAAC
GATATCGTGCACCGCGACATCAAGCCCGAGAACCTGCTGATCTCCCACAATGACGTGCTGAAG
CTGTGCGACTTCGGCTTTGCCCGGCAGCTGAGCGAGGGCAACAATGCCCAGTACACAGAGTAT
GTGGCCACCCGCTGGTACAGAAGCCCCGAGCTGCTGCTGGGCGCCCCCTATGGCAAGAGCGTG
GATATGTGGTCCGTGGGCTGCATCCTGGGCGAGCTGTCTGATGGCCAGCCTCTGTTCCCAGGC
GAGAGCGAGATCGACCAGCTGTTTACCATCCAGAAGGTGCTGGGCCCTCTGCCAAGCGAGCAG
ATGAAGCTGTTCTACTCCAACCCAAGGTTCCACGGCCTGAGGTTTCCAGCCGTGAATCACCCT
CAGAGCCTGGAGCGCCGGTATCTGGGCATCCTGAACTCCGTGCTGCTGGACCTGATGAAGAAC
CTGCTGAAGCTGGACCCCGCCGACAGATACCTGACCGAGCAGTGTCTGAATCACCCTACATTT
CAGACCCAGAGACTGCTGGATAGGAGCCCTTCCCGCTCTGCCAAGCGGAAGCCATATCACGTG
GAGAGCAGCACCCTGTCCAATCGCAACCAGGCCGGCAAGTCTACAGCCCTGCAGAGCCACCAC
CGGAGCAACTCCAAGGATATCCAGCAGCTGTCCGTGGGCCTGCCTAGGGCCGACGAGGGCCTG
CCAGCAAACGAGAGCTTCCTGAATGGAAACCTGGCAGGAGCCTCTCTGAGCCCACTGCACACA
AAGACCTACCAGGCCTCTAGCCAGCCCGGCTCCACATCTAAGGACCTGACCAACAATAACATC
CCACACCTGCTGTCTCCCAAGGAGGCCAAGAGCAAGACCGAGTTCGACTTCAACATCGACCCA
AAGCCTAGCGAGGGACCTGGCACAAAGTATCTGAAGAGCAACAGCCGGAGCCAGCAGAATAGG
CACTCCTTCATGGAGTCCTCTCAGTCTAAGGCCGGCACCCTGCAGCCAAACGAGAAGCAGAGC
AGGCACTCCTACATCGACACCATCCCACAGAGCAGCCGGAGCCCCTCCTATCGGACAAAGGCC
AAGTCTCACGGCGCCCTGTCTGATAGCAAGTCCGTGTCTCAGCTGAGCGAGGCCAGAGCCCAG
ATCGCAGAGCCCAGCACCTCCAGGTACTTTCCTTCTAGCTGTCTGGATCTGAACTCTCCTACA
AGCCCAACACCCACCAGACACAGCGACACAAGGACCCTGCTGTCTCCAAGCGGCAGAAATAAC
AGGAACGAGGGCACCCTGGACAGCCGGCGGACCACAACCAGGCACAGCAAGACAATGGAGGAG
CTGAAGCTGCCAGAGCACATGGATTCCTCTCACTCCCACTCTCTGAGCGCCCCCCACGAGTCC
TTCTCTTACGGCCTGGGCTATACCTCCCCCTTCAGCAGCCAGCAGCGCCCCCACCGGCACTCT
ATGTACGTGACAAGAGATAAGGTGAGGGCAAAGGGCCTGGACGGCAGCCTGTCCATCGGACAG
GGAATGGCAGCCCGGGCCAACTCCCTGCAGCTGCTGTCTCCTCAGCCAGGAGAGCAGCTGCCA
CCAGAGATGACCGTGGCACGGAGCAGCGTGAAGGAGACAAGCAGGGAGGGCACCTCCTCTTTC
CACACAAGACAGAAGTCCGAGGGCGGCGTGTATCACGATCCCCACTCTGACGATGGCACAGCC
CCTAAGGAGAACAGGCACCTGTACAATGACCCCGTGCCTAGGAGGGTGGGCTCCTTCTATCGC
GTGCCATCTCCCCGGCCTGATAATAGCTTTCACGAGAATAACGTGAGCACCCGGGTGAGCAGC
CTGCCATCTGAGTCTAGCTCCGGCACAAACCACTCTAAGAGGCAGCCCGCCTTTGACCCTTGG
AAGAGCCCAGAGCAGATCTCTCACAGCGAGCAGCTGAAGGAGAAGGAGAAGCAGGGCTTCTTT
CGCAGCATGAAGAAGAAGAAGAAGAAGAGCCAGACCGTGCCTAACTCCGATTCTCCAGACCTG
CTGACCCTGCAGAAGTCCATCCACAGCGCCTCCACACCCTCTAGCAGACCTAAGGAGTGGAGG
CCTGAGAAGATCAGCGACCTGCAGACCCAGAGCCAGCCACTGAAGTCCCTGCGGAAGCTGCTG
CACCTGTCCTCTGCCAGCAACCACCCAGCCAGCTCCGATCCAAGGTTCCAGCCCCTGACAGCC
CAGCAGACCAAGAACAGCTTCAGCGAGATCAGAATCCACCCTCTGTCCCAGGCCTCTGGAGGC
TCTAGCAACATCAGGCAGGAGCCAGCACCAAAGGGCCGGCCCGCCCTGCAGCTGCCTGGCCAG
ATGGACCCAGGCTGGCACGTGTCCTCTGTGACAAGATCCGCCACCGAGGGCCCATCCTACTCT
GAGCAGCTGGGAGCAAAGAGCGGACCTAATGGACACCCATATCAGAGGACCCAGAGATCCAGG

[chemical structure]

TTCCAGGGCGATTATAAGGACCACGATGGCGACTACAAGGACCACGACATTGACTACAAGGAC
GACGACGATAAAGACGGAGCACCCCATCACCACCACCATCATTGA
DNA sequence for CDKL5_107 [1-7NQ] (human optimized)
SEQ ID NO: 125
AAGATCCCCAATATCGGCAACGTGATGAATAAGTTCGAGATCCTGGGAGTGGTGGGAGAGGGA
GCCTACGGCGTGGTGCTGAAGTGCAGACACAAGGAGACACACGAGATCGTGGCCATCAAGAAG
TTTAAGGACAGCGAGGAGAATGAGGAGGTGAAGGAGACAACCCTGCGCGAGCTGAAGATGCTG
CGGACACTGAAGCAGGAGAACATCGTGGAGCTGAAGGAGGCCTTCCGGAGAAGGGGCAAGCTG
TACCTGGTGTTTGAGTATGTGGAGAAGAACATGCTGGAGCTGCTGGAGGAGATGCCTAATGGC
GTGCCCCCTGAGAAGGTGAAGTCCTACATCTATCAGCTGATCAAGGCCATCCACTGGTGCCAC
AAGAACGATATCGTGCACCGCGACATCAAGCCCGAGAACCTGCTGATCTCCCACAATGACGTG
CTGAAGCTGTGCGACTTCGGCTTTGCCCGGCAGCTGAGCGAGGGCAACAATGCCCAGTACACA
GAGTATGTGGCCACCCGCTGGTACAGAAGCCCCGAGCTGCTGCTGGGCGCCCCCTATGGCAAG
AGCGTGGATATGTGGTCCGTGGGCTGCATCCTGGGCGAGCTGTCTGATGGCCAGCCTCTGTTC
CCAGGCGAGAGCGAGATCGACCAGCTGTTTACCATCCAGAAGGTGCTGGGCCCTCTGCCAAGC
GAGCAGATGAAGCTGTTCTACTCCAACCCAAGGTTCCACGGCCTGAGGTTTCCAGCCGTGAAT
CACCCTCAGAGCCTGGAGCGCCGGTATCTGGGCATCCTGAACTCCGTGCTGCTGGACCTGATG
AAGAACCTGCTGAAGCTGGACCCCGCCGACAGATACCTGACCGAGCAGTGTCTGAATCACCCT
ACATTTCAGACCCAGAGACTGCTGGATAGGAGCCCTTCCCGCTCTGCCAAGCGGAAGCCATAT
CACGTGGAGAGCAGCACCCTGTCCAATCGCAACCAGGCCGGCAAGTCTACAGCCCTGCAGAGC
CACCACCGGAGCAACTCCAAGGATATCCAGCAGCTGTCCGTGGGCCTGCCTAGGGCCGACGAG
GGCCTGCCAGCAAACGAGAGCTTCCTGAATGGAAACCTGGCAGGAGCCTCTCTGAGCCCACTG
CACACAAAGACCTACCAGGCCTCTAGCCAGCCCGGCTCCACATCTAAGGACCTGACCAACAAT
AACATCCCACACCTGCTGTCTCCCAAGGAGGCCAAGAGCAAGACCGAGTTCGACTTCAACATC
GACCCAAAGCCTAGCGAGGGACCTGGCACAAAGTATCTGAAGAGCAACAGCCGGAGCCAGCAG
AATAGGCACTCCTTCATGGAGTCCTCTCAGTCTAAGGCCGGCACCCTGCAGCCAAACGAGAAG
CAGAGCAGGCACTCCTACATCGACACCATCCCACAGAGCAGCCGGAGCCCCTCCTATCGGACA
AAGGCCAAGTCTCACGGCGCCCTGTCTGATAGCAAGTCCGTGTCTCAGCTGAGCGAGGCCAGA
GCCCAGATCGCAGAGCCCAGCACCTCCAGGTACTTTCCTTCTAGCTGTCTGGATCTGAACTCT
CCTACAAGCCCAACACCCACCAGACACAGCGACACAAGGACCCTGCTGTCTCCAAGCGGCAGA
AATAACAGGAACGAGGGCACCCTGGACAGCCGGCGGACCACAACCAGGCACAGCAAGACAATG
GAGGAGCTGAAGCTGCCAGAGCACATGGATTCCTCTCACTCCCACTCTCTGAGCGCCCCCCAC
GAGTCCTTCTCTTACGGCCTGGGCTATACCTCCCCCTTCAGCAGCCAGCAGCGCCCCCACCGG
CACTCTATGTACGTGACAAGAGATAAGGTGAGGGCAAAGGGCCTGGACGGCAGCCTGTCCATC
GGACAGGGAATGGCAGCCCGGGCCAACTCCCTGCAGCTGCTGTCTCCTCAGCCAGGAGAGCAG
CTGCCACCAGAGATGACCGTGGCACGGAGCAGCGTGAAGGAGACAAGCAGGGAGGGCACCTCC
TCTTTCCACACAAGACAGAAGTCCGAGGGCGGCGTGTATCACGATCCCCACTCTGACGATGGC
ACAGCCCCTAAGGAGAACAGGCACCTGTACAATGACCCCGTGCCTAGGAGGGTGGGCTCCTTC
TATCGCGTGCCATCTCCCCGGCCTGATAATAGCTTTCACGAGAATAACGTGAGCACCCGGGTG
AGCAGCCTGCCATCTGAGTCTAGCTCCGGCACAAACCACTCTAAGAGGCAGCCCGCCTTTGAC
CCTTGGAAGAGCCCAGAGCAGATCTCTCACAGCGAGCAGCTGAAGGAGAAGGAGAAGCAGGGC
TTCTTTCGCAGCATGAAGAAGAAGAAGAAGAAGAGCCAGACCGTGCCTAACTCCGATTCTCCA
GACCTGCTGACCCTGCAGAAGTCCATCCACAGCGCCTCCACACCCTCTAGCAGACCTAAGGAG
TGGAGGCCTGAGAAGATCAGCGACCTGCAGACCCAGAGCCAGCCACTGAAGTCCCTGCGGAAG
CTGCTGCACCTGTCCTCTGCCAGCAACCACCCAGCCAGCTCCGATCCAAGGTTCCAGCCCCTG
ACAGCCCAGCAGACCAAGAACAGCTTCAGCGAGATCAGAATCCACCCTCTGTCCCAGGCCTCT
GGAGGCTCTAGCAACATCAGGCAGGAGCCAGCACCAAAGGGCCGGCCCGCCCTGCAGCTGCCT
GGCCAGATGGACCCAGGCTGGCACGTGTCCTCTGTGACAAGATCCGCCACCGAGGGCCCATCC
TACTCTGAGCAGCTGGGAGCAAAGAGCGGACCTAATGGACACCCATATCAGAGGACCCAGAGA
TCCAGGATGCCCAATCTGAACGATCTGAAGGAGACAGCCCTG
DNA sequence for MBIP-TATκ28-CDKL5_107-FH [2-7NQ] (human optimized)
SEQ ID NO: 126
ATGAAGCTGTCCCTGGTGGCCGCTATGCTGCTGCTGCTGTCTCTGGTCGCTGCCATGTTATTA
CTGCTGTCTGCCGCTAGGGCCGGGGACGCAGCACAGCCCGCAAGAAGAGCAAGAAGAACTAAA
CTGGCCGCTTACGCAAGGAAGGCAGCAAGACAGGCAAGAGCAGGCGGCGGCGGCTCCAAGATC
CCCAATATCGGCAACGTGATGAATAAGTTCGAGATCCTGGGAGTGGTGGGAGAGGGAGCCTAC
GGCGTGGTGCTGAAGTGCAGACACAAGGAGACACACGAGATCGTGGCCATCAAGAAGTTTAAG
GACAGCGAGGAGAATGAGGAGGTGAAGGAGACAACCCTGCGCGAGCTGAAGATGCTGCGGACA
CTGAAGCAGGAGAACATCGTGGAGCTGAAGGAGGCCTTCCGGAGAAGGGGCAAGCTGTACCTG
GTGTTTGAGTATGTGGAGAAGAACATGCTGGAGCTGCTGGAGGAGATGCCTAATGGCGTGCCC
CCTGAGAAGGTGAAGTCCTACATCTATCAGCTGATCAAGGCCATCCACTGGTGCCACAAGAAC
GATATCGTGCACCGCGACATCAAGCCCGAGAACCTGCTGATCTCCCACAATGACGTGCTGAAG
CTGTGCGACTTCGGCTTTGCCCGGAACCTGAGCGAGGGCAACAATGCCCAGTACACAGAGTAT
GTGGCCACCCGCTGGTACAGAAGCCCCGAGCTGCTGCTGGGCGCCCCCTATGGCAAGAGCGTG
GATATGTGGTCCGTGGGCTGCATCCTGGGCGAGCTGTCTGATGGCCAGCCTCTGTTCCCAGGC
GAGAGCGAGATCGACCAGCTGTTTACCATCCAGAAGGTGCTGGGCCCTCTGCCAAGCGAGCAG
ATGAAGCTGTTCTACTCCAACCCAAGGTTCCACGGCCTGAGGTTTCCAGCCGTGAATCACCCT
CAGAGCCTGGAGCGCCGGTATCTGGGCATCCTGAACTCCGTGCTGCTGGACCTGATGAAGAAC
CTGCTGAAGCTGGACCCCGCCGACAGATACCTGACCGAGCAGTGTCTGAATCACCCTACATTT
CAGACCCAGAGACTGCTGGATAGGAGCCCTTCCCGCTCTGCCAAGCGGAAGCCATATCACGTG
GAGAGCAGCACCCTGTCCAATCGCAACCAGGCCGGCAAGTCTACAGCCCTGCAGAGCCACCAC
CGGAGCAACTCCAAGGATATCCAGCAGCTGTCCGTGGGCCTGCCTAGGGCCGACGAGGGCCTG
CCAGCAAACGAGAGCTTCCTGAATGGAAACCTGGCAGGAGCCTCTCTGAGCCCACTGCACACA
AAGACCTACCAGGCCTCTAGCCAGCCCGGCTCCACATCTAAGGACCTGACCAACAATAACATC
CCACACCTGCTGTCTCCCAAGGAGGCCAAGAGCAAGACCGAGTTCGACTTCAACATCGACCCA
AAGCCTAGCGAGGGACCTGGCACAAAGTATCTGAAGAGCAACAGCCGGAGCCAGCAGAATAGG
CACTCCTTCATGGAGTCCTCTCAGTCTAAGGCCGGCACCCTGCAGCCAAACGAGAAGCAGAGC
AGGCACTCCTACATCGACACCATCCCACAGAGCAGCCGGAGCCCCTCCTATCGGACAAAGGCC
AAGTCTCACGGCGCCCTGTCTGATAGCAAGTCCGTGTCTCAGCTGAGCGAGGCCAGAGCCCAG
ATCGCAGAGCCCAGCACCTCCAGGTACTTTCCTTCTAGCTGTCTGGATCTGAACTCTCCTACA
AGCCCAACACCCACCAGACACAGCGACACAAGGACCCTGCTGTCTCCAAGCGGCAGAAATAAC
AGGAACGAGGGCACCCTGGACAGCCGGCGGACCACAACCAGGCACAGCAAGACAATGGAGGAG
CTGAAGCTGCCAGAGCACATGGATTCCTCTCACTCCCACTCTCTGAGCGCCCCCCACGAGTCC
TTCTCTTACGGCCTGGGCTATACCTCCCCCTTCAGCAGCCAGCAGCGCCCCCACCGGCACTCT
ATGTACGTGACAAGAGATAAGGTGAGGGCAAAGGGCCTGGACGGCAGCCTGTCCATCGGACAG
GGAATGGCAGCCCGGGCCAACTCCCTGCAGCTGCTGTCTCCTCAGCCAGGAGAGCAGCTGCCA
CCAGAGATGACCGTGGCACGGAGCAGCGTGAAGGAGACAAGCAGGGAGGGCACCTCCTCTTTC
CACACAAGACAGAAGTCCGAGGGCGGCGTGTATCACGATCCCCACTCTGACGATGGCACAGCC
CCTAAGGAGAACAGGCACCTGTACAATGACCCCGTGCCTAGGAGGGTGGGCTCCTTCTATCGC
GTGCCATCTCCCCGGCCTGATAATAGCTTTCACGAGAATAACGTGAGCACCCGGGTGAGCAGC
CTGCCATCTGAGTCTAGCTCCGGCACAAACCACTCTAAGAGGCAGCCCGCCTTTGACCCTTGG
AAGAGCCCAGAGCAGATCTCTCACAGCGAGCAGCTGAAGGAGAAGGAGAAGCAGGGCTTCTTT
CGCAGCATGAAGAAGAAGAAGAAGAAGAGCCAGACCGTGCCTAACTCCGATTCTCCAGACCTG
CTGACCCTGCAGAAGTCCATCCACAGCGCCTCCACACCCTCTAGCAGACCTAAGGAGTGGAGG
CCTGAGAAGATCAGCGACCTGCAGACCCAGAGCCAGCCACTGAAGTCCCTGCGGAAGCTGCTG
CACCTGTCCTCTGCCAGCAACCACCCAGCCAGCTCCGATCCAAGGTTCCAGCCCCTGACAGCC
CAGCAGACCAAGAACAGCTTCAGCGAGATCAGAATCCACCCTCTGTCCCAGGCCTCTGGAGGC
TCTAGCAACATCAGGCAGGAGCCAGCACCAAAGGGCCGGCCCGCCCTGCAGCTGCCTGGCCAG
ATGGACCCAGGCTGGCACGTGTCCTCTGTGACAAGATCCGCCACCGAGGGCCCATCCTACTCT
GAGCAGCTGGGAGCAAAGAGCGGACCTAATGGACACCCATATCAGAGGACCCAGAGATCCAGG

[chemical structure]

TTCCAGGGCGATTATAAGGACCACGATGGCGACTACAAGGACCACGACATTGACTACAAGGAC
GACGACGATAAAGACGGAGCACCCCATCACCACCACCATCATTGA
DNA sequence for CDKL5_107[2-7NQ] (human optimized)
SEQ ID NO: 127
AAGATCCCCAATATCGGCAACGTGATGAATAAGTTCGAGATCCTGGGAGTGGTGGGAGAGGGA
GCCTACGGCGTGGTGCTGAAGTGCAGACACAAGGAGACACACGAGATCGTGGCCATCAAGAAG
TTTAAGGACAGCGAGGAGAATGAGGAGGTGAAGGAGACAACCCTGCGCGAGCTGAAGATGCTG
CGGACACTGAAGCAGGAGAACATCGTGGAGCTGAAGGAGGCCTTCCGGAGAAGGGGCAAGCTG
TACCTGGTGTTTGAGTATGTGGAGAAGAACATGCTGGAGCTGCTGGAGGAGATGCCTAATGGC
GTGCCCCCTGAGAAGGTGAAGTCCTACATCTATCAGCTGATCAAGGCCATCCACTGGTGCCAC
AAGAACGATATCGTGCACCGCGACATCAAGCCCGAGAACCTGCTGATCTCCCACAATGACGTG
CTGAAGCTGTGCGACTTCGGCTTTGCCCGGAACCTGAGCGAGGGCAACAATGCCCAGTACACA
GAGTATGTGGCCACCCGCTGGTACAGAAGCCCCGAGCTGCTGCTGGGCGCCCCCTATGGCAAG
AGCGTGGATATGTGGTCCGTGGGCTGCATCCTGGGCGAGCTGTCTGATGGCCAGCCTCTGTTC
CCAGGCGAGAGCGAGATCGACCAGCTGTTTACCATCCAGAAGGTGCTGGGCCCTCTGCCAAGC
GAGCAGATGAAGCTGTTCTACTCCAACCCAAGGTTCCACGGCCTGAGGTTTCCAGCCGTGAAT
CACCCTCAGAGCCTGGAGCGCCGGTATCTGGGCATCCTGAACTCCGTGCTGCTGGACCTGATG
AAGAACCTGCTGAAGCTGGACCCCGCCGACAGATACCTGACCGAGCAGTGTCTGAATCACCCT
ACATTTCAGACCCAGAGACTGCTGGATAGGAGCCCTTCCCGCTCTGCCAAGCGGAAGCCATAT
CACGTGGAGAGCAGCACCCTGTCCAATCGCAACCAGGCCGGCAAGTCTACAGCCCTGCAGAGC
CACCACCGGAGCAACTCCAAGGATATCCAGCAGCTGTCCGTGGGCCTGCCTAGGGCCGACGAG
GGCCTGCCAGCAAACGAGAGCTTCCTGAATGGAAACCTGGCAGGAGCCTCTCTGAGCCCACTG
CACACAAAGACCTACCAGGCCTCTAGCCAGCCCGGCTCCACATCTAAGGACCTGACCAACAAT
AACATCCCACACCTGCTGTCTCCCAAGGAGGCCAAGAGCAAGACCGAGTTCGACTTCAACATC
GACCCAAAGCCTAGCGAGGGACCTGGCACAAAGTATCTGAAGAGCAACAGCCGGAGCCAGCAG
AATAGGCACTCCTTCATGGAGTCCTCTCAGTCTAAGGCCGGCACCCTGCAGCCAAACGAGAAG
CAGAGCAGGCACTCCTACATCGACACCATCCCACAGAGCAGCCGGAGCCCCTCCTATCGGACA
AAGGCCAAGTCTCACGGCGCCCTGTCTGATAGCAAGTCCGTGTCTCAGCTGAGCGAGGCCAGA
GCCCAGATCGCAGAGCCCAGCACCTCCAGGTACTTTCCTTCTAGCTGTCTGGATCTGAACTCT
CCTACAAGCCCAACACCCACCAGACACAGCGACACAAGGACCCTGCTGTCTCCAAGCGGCAGA
AATAACAGGAACGAGGGCACCCTGGACAGCCGGCGGACCACAACCAGGCACAGCAAGACAATG
GAGGAGCTGAAGCTGCCAGAGCACATGGATTCCTCTCACTCCCACTCTCTGAGCGCCCCCCAC
GAGTCCTTCTCTTACGGCCTGGGCTATACCTCCCCCTTCAGCAGCCAGCAGCGCCCCCACCGG
CACTCTATGTACGTGACAAGAGATAAGGTGAGGGCAAAGGGCCTGGACGGCAGCCTGTCCATC
GGACAGGGAATGGCAGCCCGGGCCAACTCCCTGCAGCTGCTGTCTCCTCAGCCAGGAGAGCAG
CTGCCACCAGAGATGACCGTGGCACGGAGCAGCGTGAAGGAGACAAGCAGGGAGGGCACCTCC
TCTTTCCACACAAGACAGAAGTCCGAGGGCGGCGTGTATCACGATCCCCACTCTGACGATGGC
ACAGCCCCTAAGGAGAACAGGCACCTGTACAATGACCCCGTGCCTAGGAGGGTGGGCTCCTTC
TATCGCGTGCCATCTCCCCGGCCTGATAATAGCTTTCACGAGAATAACGTGAGCACCCGGGTG
AGCAGCCTGCCATCTGAGTCTAGCTCCGGCACAAACCACTCTAAGAGGCAGCCCGCCTTTGAC
CCTTGGAAGAGCCCAGAGCAGATCTCTCACAGCGAGCAGCTGAAGGAGAAGGAGAAGCAGGGC
TTCTTTCGCAGCATGAAGAAGAAGAAGAAGAAGAGCCAGACCGTGCCTAACTCCGATTCTCCA
GACCTGCTGACCCTGCAGAAGTCCATCCACAGCGCCTCCACACCCTCTAGCAGACCTAAGGAG
TGGAGGCCTGAGAAGATCAGCGACCTGCAGACCCAGAGCCAGCCACTGAAGTCCCTGCGGAAG
CTGCTGCACCTGTCCTCTGCCAGCAACCACCCAGCCAGCTCCGATCCAAGGTTCCAGCCCCTG
ACAGCCCAGCAGACCAAGAACAGCTTCAGCGAGATCAGAATCCACCCTCTGTCCCAGGCCTCT
GGAGGCTCTAGCAACATCAGGCAGGAGCCAGCACCAAAGGGCCGGCCCGCCCTGCAGCTGCCT
GGCCAGATGGACCCAGGCTGGCACGTGTCCTCTGTGACAAGATCCGCCACCGAGGGCCCATCC
TACTCTGAGCAGCTGGGAGCAAAGAGCGGACCTAATGGACACCCATATCAGAGGACCCAGAGA
TCCAGGATGCCCAATCTGAACGATCTGAAGGAGACAGCCCTG
DNA sequence for MBIP-TATκ28-CDKL5107-FH [1,3-7NQ]
(human optimized)
SEQ ID NO: 128
ATGAAGCTGTCCCTGGTGGCCGCTATGCTGCTGCTGCTGTCTCTGGTCGCTGCCATGTTATTA
CTGCTGTCTGCCGCTAGGGCCGGGGACGCAGCACAGCCCGCAAGAAGAGCAAGAAGAACTAAA
CTGGCCGCTTACGCAAGGAAGGCAGCAAGACAGGCAAGAGCAGGCGGCGGCGGCTCCAAGATC
CCCAATATCGGCAACGTGATGAATAAGTTCGAGATCCTGGGAGTGGTGGGAGAGGGAGCCTAC
GGCGTGGTGCTGAAGTGCAGACACAAGGAGACACACGAGATCGTGGCCATCAAGAAGTTTAAG
GACAGCGAGGAGAATGAGGAGGTGAAGGAGACAACCCTGCGCGAGCTGAAGATGCTGCGGACA
CTGAAGCAGGAGAACATCGTGGAGCTGAAGGAGGCCTTCCGGAGAAGGGGCAAGCTGTACCTG
GTGTTTGAGTATGTGGAGAAGAACATGCTGGAGCTGCTGGAGGAGATGCCTAATGGCGTGCCC
CCTGAGAAGGTGAAGTCCTACATCTATCAGCTGATCAAGGCCATCCACTGGTGCCACAAGAAC
GATATCGTGCACCGCGACATCAAGCCCGAGAACCTGCTGATCTCCCACAATGACGTGCTGAAG
CTGTGCGACTTCGGCTTTGCCCGGCAGCTGAGCGAGGGCAACAATGCCAATTACACAGAGTAT
GTGGCCACCCGCTGGTACAGAAGCCCCGAGCTGCTGCTGGGCGCCCCCTATGGCAAGAGCGTG
GATATGTGGTCCGTGGGCTGCATCCTGGGCGAGCTGTCTGATGGCCAGCCTCTGTTCCCAGGC
GAGAGCGAGATCGACCAGCTGTTTACCATCCAGAAGGTGCTGGGCCCTCTGCCAAGCGAGCAG
ATGAAGCTGTTCTACTCCAACCCAAGGTTCCACGGCCTGAGGTTTCCAGCCGTGAATCACCCT
CAGAGCCTGGAGCGCCGGTATCTGGGCATCCTGAACTCCGTGCTGCTGGACCTGATGAAGAAC
CTGCTGAAGCTGGACCCCGCCGACAGATACCTGACCGAGCAGTGTCTGAATCACCCTACATTT
CAGACCCAGAGACTGCTGGATAGGAGCCCTTCCCGCTCTGCCAAGCGGAAGCCATATCACGTG
GAGAGCAGCACCCTGTCCAATCGCAACCAGGCCGGCAAGTCTACAGCCCTGCAGAGCCACCAC
CGGAGCAACTCCAAGGATATCCAGCAGCTGTCCGTGGGCCTGCCTAGGGCCGACGAGGGCCTG
CCAGCAAACGAGAGCTTCCTGAATGGAAACCTGGCAGGAGCCTCTCTGAGCCCACTGCACACA
AAGACCTACCAGGCCTCTAGCCAGCCCGGCTCCACATCTAAGGACCTGACCAACAATAACATC
CCACACCTGCTGTCTCCCAAGGAGGCCAAGAGCAAGACCGAGTTCGACTTCAACATCGACCCA
AAGCCTAGCGAGGGACCTGGCACAAAGTATCTGAAGAGCAACAGCCGGAGCCAGCAGAATAGG
CACTCCTTCATGGAGTCCTCTCAGTCTAAGGCCGGCACCCTGCAGCCAAACGAGAAGCAGAGC
AGGCACTCCTACATCGACACCATCCCACAGAGCAGCCGGAGCCCCTCCTATCGGACAAAGGCC
AAGTCTCACGGCGCCCTGTCTGATAGCAAGTCCGTGTCTCAGCTGAGCGAGGCCAGAGCCCAG
ATCGCAGAGCCCAGCACCTCCAGGTACTTTCCTTCTAGCTGTCTGGATCTGAACTCTCCTACA
AGCCCAACACCCACCAGACACAGCGACACAAGGACCCTGCTGTCTCCAAGCGGCAGAAATAAC
AGGAACGAGGGCACCCTGGACAGCCGGCGGACCACAACCAGGCACAGCAAGACAATGGAGGAG
CTGAAGCTGCCAGAGCACATGGATTCCTCTCACTCCCACTCTCTGAGCGCCCCCCACGAGTCC
TTCTCTTACGGCCTGGGCTATACCTCCCCCTTCAGCAGCCAGCAGCGCCCCCACCGGCACTCT
ATGTACGTGACAAGAGATAAGGTGAGGGCAAAGGGCCTGGACGGCAGCCTGTCCATCGGACAG
GGAATGGCAGCCCGGGCCAACTCCCTGCAGCTGCTGTCTCCTCAGCCAGGAGAGCAGCTGCCA
CCAGAGATGACCGTGGCACGGAGCAGCGTGAAGGAGACAAGCAGGGAGGGCACCTCCTCTTTC
CACACAAGACAGAAGTCCGAGGGCGGCGTGTATCACGATCCCCACTCTGACGATGGCACAGCC
CCTAAGGAGAACAGGCACCTGTACAATGACCCCGTGCCTAGGAGGGTGGGCTCCTTCTATCGC
GTGCCATCTCCCCGGCCTGATAATAGCTTTCACGAGAATAACGTGAGCACCCGGGTGAGCAGC
CTGCCATCTGAGTCTAGCTCCGGCACAAACCACTCTAAGAGGCAGCCCGCCTTTGACCCTTGG
AAGAGCCCAGAGCAGATCTCTCACAGCGAGCAGCTGAAGGAGAAGGAGAAGCAGGGCTTCTTT
CGCAGCATGAAGAAGAAGAAGAAGAAGAGCCAGACCGTGCCTAACTCCGATTCTCCAGACCTG
CTGACCCTGCAGAAGTCCATCCACAGCGCCTCCACACCCTCTAGCAGACCTAAGGAGTGGAGG
CCTGAGAAGATCAGCGACCTGCAGACCCAGAGCCAGCCACTGAAGTCCCTGCGGAAGCTGCTG
CACCTGTCCTCTGCCAGCAACCACCCAGCCAGCTCCGATCCAAGGTTCCAGCCCCTGACAGCC
CAGCAGACCAAGAACAGCTTCAGCGAGATCAGAATCCACCCTCTGTCCCAGGCCTCTGGAGGC
TCTAGCAACATCAGGCAGGAGCCAGCACCAAAGGGCCGGCCCGCCCTGCAGCTGCCTGGCCAG
ATGGACCCAGGCTGGCACGTGTCCTCTGTGACAAGATCCGCCACCGAGGGCCCATCCTACTCT
GAGCAGCTGGGAGCAAAGAGCGGACCTAATGGACACCCATATCAGAGGACCCAGAGATCCAGG

[chemical structure]

TTCCAGGGCGATTATAAGGACCACGATGGCGACTACAAGGACCACGACATTGACTACAAGGAC
GACGACGATAAAGACGGAGCACCCCATCACCACCACCATCATTGA
DNA sequence for CDKL5_107 [1,3-7NQ] (human optimized)
SEQ ID NO: 129
AAGATCCCCAATATCGGCAACGTGATGAATAAGTTCGAGATCCTGGGAGTGGTGGGAGAGGGA
GCCTACGGCGTGGTGCTGAAGTGCAGACACAAGGAGACACACGAGATCGTGGCCATCAAGAAG
TTTAAGGACAGCGAGGAGAATGAGGAGGTGAAGGAGACAACCCTGCGCGAGCTGAAGATGCTG
CGGACACTGAAGCAGGAGAACATCGTGGAGCTGAAGGAGGCCTTCCGGAGAAGGGGCAAGCTG
TACCTGGTGTTTGAGTATGTGGAGAAGAACATGCTGGAGCTGCTGGAGGAGATGCCTAATGGC
GTGCCCCCTGAGAAGGTGAAGTCCTACATCTATCAGCTGATCAAGGCCATCCACTGGTGCCAC
AAGAACGATATCGTGCACCGCGACATCAAGCCCGAGAACCTGCTGATCTCCCACAATGACGTG
CTGAAGCTGTGCGACTTCGGCTTTGCCCGGCAGCTGAGCGAGGGCAACAATGCCAATTACACA
GAGTATGTGGCCACCCGCTGGTACAGAAGCCCCGAGCTGCTGCTGGGCGCCCCCTATGGCAAG
AGCGTGGATATGTGGTCCGTGGGCTGCATCCTGGGCGAGCTGTCTGATGGCCAGCCTCTGTTC
CCAGGCGAGAGCGAGATCGACCAGCTGTTTACCATCCAGAAGGTGCTGGGCCCTCTGCCAAGC
GAGCAGATGAAGCTGTTCTACTCCAACCCAAGGTTCCACGGCCTGAGGTTTCCAGCCGTGAAT
CACCCTCAGAGCCTGGAGCGCCGGTATCTGGGCATCCTGAACTCCGTGCTGCTGGACCTGATG
AAGAACCTGCTGAAGCTGGACCCCGCCGACAGATACCTGACCGAGCAGTGTCTGAATCACCCT
ACATTTCAGACCCAGAGACTGCTGGATAGGAGCCCTTCCCGCTCTGCCAAGCGGAAGCCATAT
CACGTGGAGAGCAGCACCCTGTCCAATCGCAACCAGGCCGGCAAGTCTACAGCCCTGCAGAGC
CACCACCGGAGCAACTCCAAGGATATCCAGCAGCTGTCCGTGGGCCTGCCTAGGGCCGACGAG
GGCCTGCCAGCAAACGAGAGCTTCCTGAATGGAAACCTGGCAGGAGCCTCTCTGAGCCCACTG
CACACAAAGACCTACCAGGCCTCTAGCCAGCCCGGCTCCACATCTAAGGACCTGACCAACAAT
AACATCCCACACCTGCTGTCTCCCAAGGAGGCCAAGAGCAAGACCGAGTTCGACTTCAACATC
GACCCAAAGCCTAGCGAGGGACCTGGCACAAAGTATCTGAAGAGCAACAGCCGGAGCCAGCAG
AATAGGCACTCCTTCATGGAGTCCTCTCAGTCTAAGGCCGGCACCCTGCAGCCAAACGAGAAG
CAGAGCAGGCACTCCTACATCGACACCATCCCACAGAGCAGCCGGAGCCCCTCCTATCGGACA
AAGGCCAAGTCTCACGGCGCCCTGTCTGATAGCAAGTCCGTGTCTCAGCTGAGCGAGGCCAGA
GCCCAGATCGCAGAGCCCAGCACCTCCAGGTACTTTCCTTCTAGCTGTCTGGATCTGAACTCT
CCTACAAGCCCAACACCCACCAGACACAGCGACACAAGGACCCTGCTGTCTCCAAGCGGCAGA
AATAACAGGAACGAGGGCACCCTGGACAGCCGGCGGACCACAACCAGGCACAGCAAGACAATG
GAGGAGCTGAAGCTGCCAGAGCACATGGATTCCTCTCACTCCCACTCTCTGAGCGCCCCCCAC
GAGTCCTTCTCTTACGGCCTGGGCTATACCTCCCCCTTCAGCAGCCAGCAGCGCCCCCACCGG
CACTCTATGTACGTGACAAGAGATAAGGTGAGGGCAAAGGGCCTGGACGGCAGCCTGTCCATC
GGACAGGGAATGGCAGCCCGGGCCAACTCCCTGCAGCTGCTGTCTCCTCAGCCAGGAGAGCAG
CTGCCACCAGAGATGACCGTGGCACGGAGCAGCGTGAAGGAGACAAGCAGGGAGGGCACCTCC
TCTTTCCACACAAGACAGAAGTCCGAGGGCGGCGTGTATCACGATCCCCACTCTGACGATGGC
ACAGCCCCTAAGGAGAACAGGCACCTGTACAATGACCCCGTGCCTAGGAGGGTGGGCTCCTTC
TATCGCGTGCCATCTCCCCGGCCTGATAATAGCTTTCACGAGAATAACGTGAGCACCCGGGTG
AGCAGCCTGCCATCTGAGTCTAGCTCCGGCACAAACCACTCTAAGAGGCAGCCCGCCTTTGAC
CCTTGGAAGAGCCCAGAGCAGATCTCTCACAGCGAGCAGCTGAAGGAGAAGGAGAAGCAGGGC
TTCTTTCGCAGCATGAAGAAGAAGAAGAAGAAGAGCCAGACCGTGCCTAACTCCGATTCTCCA
GACCTGCTGACCCTGCAGAAGTCCATCCACAGCGCCTCCACACCCTCTAGCAGACCTAAGGAG
TGGAGGCCTGAGAAGATCAGCGACCTGCAGACCCAGAGCCAGCCACTGAAGTCCCTGCGGAAG
CTGCTGCACCTGTCCTCTGCCAGCAACCACCCAGCCAGCTCCGATCCAAGGTTCCAGCCCCTG
ACAGCCCAGCAGACCAAGAACAGCTTCAGCGAGATCAGAATCCACCCTCTGTCCCAGGCCTCT
GGAGGCTCTAGCAACATCAGGCAGGAGCCAGCACCAAAGGGCCGGCCCGCCCTGCAGCTGCCT
GGCCAGATGGACCCAGGCTGGCACGTGTCCTCTGTGACAAGATCCGCCACCGAGGGCCCATCC
TACTCTGAGCAGCTGGGAGCAAAGAGCGGACCTAATGGACACCCATATCAGAGGACCCAGAGA
TCCAGGATGCCCAATCTGAACGATCTGAAGGAGACAGCCCTG
DNA sequence for MBIP-TATκ28-CDKL5_107-FH [1-2,4-7NQ]
(human optimized)
SEQ ID NO: 130
ATGAAGCTGTCCCTGGTGGCCGCTATGCTGCTGCTGCTGTCTCTGGTCGCTGCCATGTTATTA
CTGCTGTCTGCCGCTAGGGCCGGGGACGCAGCACAGCCCGCAAGAAGAGCAAGAAGAACTAAA
CTGGCCGCTTACGCAAGGAAGGCAGCAAGACAGGCAAGAGCAGGCGGCGGCGGCTCCAAGATC
CCCAATATCGGCAACGTGATGAATAAGTTCGAGATCCTGGGAGTGGTGGGAGAGGGAGCCTAC
GGCGTGGTGCTGAAGTGCAGACACAAGGAGACACACGAGATCGTGGCCATCAAGAAGTTTAAG
GACAGCGAGGAGAATGAGGAGGTGAAGGAGACAACCCTGCGCGAGCTGAAGATGCTGCGGACA
CTGAAGCAGGAGAACATCGTGGAGCTGAAGGAGGCCTTCCGGAGAAGGGGCAAGCTGTACCTG
GTGTTTGAGTATGTGGAGAAGAACATGCTGGAGCTGCTGGAGGAGATGCCTAATGGCGTGCCC
CCTGAGAAGGTGAAGTCCTACATCTATCAGCTGATCAAGGCCATCCACTGGTGCCACAAGAAC
GATATCGTGCACCGCGACATCAAGCCCGAGAACCTGCTGATCTCCCACAATGACGTGCTGAAG
CTGTGCGACTTCGGCTTTGCCCGGCAGCTGAGCGAGGGCAACAATGCCCAGTACACAGAGTAT
GTGGCCACCCGCTGGTACAGAAGCCCCGAGCTGCTGCTGGGCGCCCCCTATGGCAAGAGCGTG
GATATGTGGTCCGTGGGCTGCATCCTGGGCGAGCTGTCTGATGGCCAGCCTCTGTTCCCAGGC
GAGAGCGAGATCGACCAGCTGTTTACCATCCAGAAGGTGCTGGGCCCTCTGCCAAGCGAGCAG
ATGAAGCTGTTCTACTCCAACCCAAGGTTCCACGGCCTGAGGTTTCCAGCCGTGAATCACCCT
CAGAGCCTGGAGCGCCGGTATCTGGGCATCCTGAACTCCGTGCTGCTGGACCTGATGAAGAAC
CTGCTGAAGCTGGACCCCGCCGACAGATACCTGACCGAGCAGTGTCTGAATCACCCTACATTT
CAGACCCAGAGACTGCTGGATAGGAGCCCTTCCCGCTCTGCCAAGCGGAAGCCATATCACGTG
GAGAGCAGCACCCTGTCCAATCGCAACCAGGCCGGCAAGTCTACAGCCCTGCAGAGCCACCAC
CGGAGCAACTCCAAGGATATCCAGAATCTGTCCGTGGGCCTGCCTAGGGCCGACGAGGGCCTG
CCAGCAAACGAGAGCTTCCTGAATGGAAACCTGGCAGGAGCCTCTCTGAGCCCACTGCACACA
AAGACCTACCAGGCCTCTAGCCAGCCCGGCTCCACATCTAAGGACCTGACCAACAATAACATC
CCACACCTGCTGTCTCCCAAGGAGGCCAAGAGCAAGACCGAGTTCGACTTCAACATCGACCCA
AAGCCTAGCGAGGGACCTGGCACAAAGTATCTGAAGAGCAACAGCCGGAGCCAGCAGAATAGG
CACTCCTTCATGGAGTCCTCTCAGTCTAAGGCCGGCACCCTGCAGCCAAACGAGAAGCAGAGC
AGGCACTCCTACATCGACACCATCCCACAGAGCAGCCGGAGCCCCTCCTATCGGACAAAGGCC
AAGTCTCACGGCGCCCTGTCTGATAGCAAGTCCGTGTCTCAGCTGAGCGAGGCCAGAGCCCAG
ATCGCAGAGCCCAGCACCTCCAGGTACTTTCCTTCTAGCTGTCTGGATCTGAACTCTCCTACA
AGCCCAACACCCACCAGACACAGCGACACAAGGACCCTGCTGTCTCCAAGCGGCAGAAATAAC
AGGAACGAGGGCACCCTGGACAGCCGGCGGACCACAACCAGGCACAGCAAGACAATGGAGGAG
CTGAAGCTGCCAGAGCACATGGATTCCTCTCACTCCCACTCTCTGAGCGCCCCCCACGAGTCC
TTCTCTTACGGCCTGGGCTATACCTCCCCCTTCAGCAGCCAGCAGCGCCCCCACCGGCACTCT
ATGTACGTGACAAGAGATAAGGTGAGGGCAAAGGGCCTGGACGGCAGCCTGTCCATCGGACAG
GGAATGGCAGCCCGGGCCAACTCCCTGCAGCTGCTGTCTCCTCAGCCAGGAGAGCAGCTGCCA
CCAGAGATGACCGTGGCACGGAGCAGCGTGAAGGAGACAAGCAGGGAGGGCACCTCCTCTTTC
CACACAAGACAGAAGTCCGAGGGCGGCGTGTATCACGATCCCCACTCTGACGATGGCACAGCC
CCTAAGGAGAACAGGCACCTGTACAATGACCCCGTGCCTAGGAGGGTGGGCTCCTTCTATCGC
GTGCCATCTCCCCGGCCTGATAATAGCTTTCACGAGAATAACGTGAGCACCCGGGTGAGCAGC
CTGCCATCTGAGTCTAGCTCCGGCACAAACCACTCTAAGAGGCAGCCCGCCTTTGACCCTTGG
AAGAGCCCAGAGCAGATCTCTCACAGCGAGCAGCTGAAGGAGAAGGAGAAGCAGGGCTTCTTT
CGCAGCATGAAGAAGAAGAAGAAGAAGAGCCAGACCGTGCCTAACTCCGATTCTCCAGACCTG
CTGACCCTGCAGAAGTCCATCCACAGCGCCTCCACACCCTCTAGCAGACCTAAGGAGTGGAGG
CCTGAGAAGATCAGCGACCTGCAGACCCAGAGCCAGCCACTGAAGTCCCTGCGGAAGCTGCTG
CACCTGTCCTCTGCCAGCAACCACCCAGCCAGCTCCGATCCAAGGTTCCAGCCCCTGACAGCC
CAGCAGACCAAGAACAGCTTCAGCGAGATCAGAATCCACCCTCTGTCCCAGGCCTCTGGAGGC
TCTAGCAACATCAGGCAGGAGCCAGCACCAAAGGGCCGGCCCGCCCTGCAGCTGCCTGGCCAG
ATGGACCCAGGCTGGCACGTGTCCTCTGTGACAAGATCCGCCACCGAGGGCCCATCCTACTCT
GAGCAGCTGGGAGCAAAGAGCGGACCTAATGGACACCCATATCAGAGGACCCAGAGATCCAGG

[chemical structure]

TTCCAGGGCGATTATAAGGACCACGATGGCGACTACAAGGACCACGACATTGACTACAAGGAC
GACGACGATAAAGACGGAGCACCCCATCACCACCACCATCATTGA
DNA sequence for CDKL5_107 [1-2,4-7NQ] (human optimized)
SEQ ID NO: 131
AAGATCCCCAATATCGGCAACGTGATGAATAAGTTCGAGATCCTGGGAGTGGTGGGAGAGGGA
GCCTACGGCGTGGTGCTGAAGTGCAGACACAAGGAGACACACGAGATCGTGGCCATCAAGAAG
TTTAAGGACAGCGAGGAGAATGAGGAGGTGAAGGAGACAACCCTGCGCGAGCTGAAGATGCTG
CGGACACTGAAGCAGGAGAACATCGTGGAGCTGAAGGAGGCCTTCCGGAGAAGGGGCAAGCTG
TACCTGGTGTTTGAGTATGTGGAGAAGAACATGCTGGAGCTGCTGGAGGAGATGCCTAATGGC
GTGCCCCCTGAGAAGGTGAAGTCCTACATCTATCAGCTGATCAAGGCCATCCACTGGTGCCAC
AAGAACGATATCGTGCACCGCGACATCAAGCCCGAGAACCTGCTGATCTCCCACAATGACGTG
CTGAAGCTGTGCGACTTCGGCTTTGCCCGGCAGCTGAGCGAGGGCAACAATGCCCAGTACACA
GAGTATGTGGCCACCCGCTGGTACAGAAGCCCCGAGCTGCTGCTGGGCGCCCCCTATGGCAAG
AGCGTGGATATGTGGTCCGTGGGCTGCATCCTGGGCGAGCTGTCTGATGGCCAGCCTCTGTTC
CCAGGCGAGAGCGAGATCGACCAGCTGTTTACCATCCAGAAGGTGCTGGGCCCTCTGCCAAGC
GAGCAGATGAAGCTGTTCTACTCCAACCCAAGGTTCCACGGCCTGAGGTTTCCAGCCGTGAAT
CACCCTCAGAGCCTGGAGCGCCGGTATCTGGGCATCCTGAACTCCGTGCTGCTGGACCTGATG
AAGAACCTGCTGAAGCTGGACCCCGCCGACAGATACCTGACCGAGCAGTGTCTGAATCACCCT
ACATTTCAGACCCAGAGACTGCTGGATAGGAGCCCTTCCCGCTCTGCCAAGCGGAAGCCATAT
CACGTGGAGAGCAGCACCCTGTCCAATCGCAACCAGGCCGGCAAGTCTACAGCCCTGCAGAGC
CACCACCGGAGCAACTCCAAGGATATCCAGAATCTGTCCGTGGGCCTGCCTAGGGCCGACGAG
GGCCTGCCAGCAAACGAGAGCTTCCTGAATGGAAACCTGGCAGGAGCCTCTCTGAGCCCACTG
CACACAAAGACCTACCAGGCCTCTAGCCAGCCCGGCTCCACATCTAAGGACCTGACCAACAAT
AACATCCCACACCTGCTGTCTCCCAAGGAGGCCAAGAGCAAGACCGAGTTCGACTTCAACATC
GACCCAAAGCCTAGCGAGGGACCTGGCACAAAGTATCTGAAGAGCAACAGCCGGAGCCAGCAG
AATAGGCACTCCTTCATGGAGTCCTCTCAGTCTAAGGCCGGCACCCTGCAGCCAAACGAGAAG
CAGAGCAGGCACTCCTACATCGACACCATCCCACAGAGCAGCCGGAGCCCCTCCTATCGGACA
AAGGCCAAGTCTCACGGCGCCCTGTCTGATAGCAAGTCCGTGTCTCAGCTGAGCGAGGCCAGA
GCCCAGATCGCAGAGCCCAGCACCTCCAGGTACTTTCCTTCTAGCTGTCTGGATCTGAACTCT
CCTACAAGCCCAACACCCACCAGACACAGCGACACAAGGACCCTGCTGTCTCCAAGCGGCAGA
AATAACAGGAACGAGGGCACCCTGGACAGCCGGCGGACCACAACCAGGCACAGCAAGACAATG
GAGGAGCTGAAGCTGCCAGAGCACATGGATTCCTCTCACTCCCACTCTCTGAGCGCCCCCCAC
GAGTCCTTCTCTTACGGCCTGGGCTATACCTCCCCCTTCAGCAGCCAGCAGCGCCCCCACCGG
CACTCTATGTACGTGACAAGAGATAAGGTGAGGGCAAAGGGCCTGGACGGCAGCCTGTCCATC
GGACAGGGAATGGCAGCCCGGGCCAACTCCCTGCAGCTGCTGTCTCCTCAGCCAGGAGAGCAG
CTGCCACCAGAGATGACCGTGGCACGGAGCAGCGTGAAGGAGACAAGCAGGGAGGGCACCTCC
TCTTTCCACACAAGACAGAAGTCCGAGGGCGGCGTGTATCACGATCCCCACTCTGACGATGGC
ACAGCCCCTAAGGAGAACAGGCACCTGTACAATGACCCCGTGCCTAGGAGGGTGGGCTCCTTC
TATCGCGTGCCATCTCCCCGGCCTGATAATAGCTTTCACGAGAATAACGTGAGCACCCGGGTG
AGCAGCCTGCCATCTGAGTCTAGCTCCGGCACAAACCACTCTAAGAGGCAGCCCGCCTTTGAC
CCTTGGAAGAGCCCAGAGCAGATCTCTCACAGCGAGCAGCTGAAGGAGAAGGAGAAGCAGGGC
TTCTTTCGCAGCATGAAGAAGAAGAAGAAGAAGAGCCAGACCGTGCCTAACTCCGATTCTCCA
GACCTGCTGACCCTGCAGAAGTCCATCCACAGCGCCTCCACACCCTCTAGCAGACCTAAGGAG
TGGAGGCCTGAGAAGATCAGCGACCTGCAGACCCAGAGCCAGCCACTGAAGTCCCTGCGGAAG
CTGCTGCACCTGTCCTCTGCCAGCAACCACCCAGCCAGCTCCGATCCAAGGTTCCAGCCCCTG
ACAGCCCAGCAGACCAAGAACAGCTTCAGCGAGATCAGAATCCACCCTCTGTCCCAGGCCTCT
GGAGGCTCTAGCAACATCAGGCAGGAGCCAGCACCAAAGGGCCGGCCCGCCCTGCAGCTGCCT
GGCCAGATGGACCCAGGCTGGCACGTGTCCTCTGTGACAAGATCCGCCACCGAGGGCCCATCC
TACTCTGAGCAGCTGGGAGCAAAGAGCGGACCTAATGGACACCCATATCAGAGGACCCAGAGA
TCCAGGATGCCCAATCTGAACGATCTGAAGGAGACAGCCCTG
DNA sequence for MBIP-TATκ28-CDKL5_107-FH [1-3,5-7NQ]
(human optimized)
SEQ ID NO: 132
ATGAAGCTGTCCCTGGTGGCCGCTATGCTGCTGCTGCTGTCTCTGGTCGCTGCCATGTTATTA
CTGCTGTCTGCCGCTAGGGCCGGGGACGCAGCACAGCCCGCAAGAAGAGCAAGAAGAACTAAA
CTGGCCGCTTACGCAAGGAAGGCAGCAAGACAGGCAAGAGCAGGCGGCGGCGGCTCCAAGATC
CCCAATATCGGCAACGTGATGAATAAGTTCGAGATCCTGGGAGTGGTGGGAGAGGGAGCCTAC
GGCGTGGTGCTGAAGTGCAGACACAAGGAGACACACGAGATCGTGGCCATCAAGAAGTTTAAG
GACAGCGAGGAGAATGAGGAGGTGAAGGAGACAACCCTGCGCGAGCTGAAGATGCTGCGGACA
CTGAAGCAGGAGAACATCGTGGAGCTGAAGGAGGCCTTCCGGAGAAGGGGCAAGCTGTACCTG
GTGTTTGAGTATGTGGAGAAGAACATGCTGGAGCTGCTGGAGGAGATGCCTAATGGCGTGCCC
CCTGAGAAGGTGAAGTCCTACATCTATCAGCTGATCAAGGCCATCCACTGGTGCCACAAGAAC
GATATCGTGCACCGCGACATCAAGCCCGAGAACCTGCTGATCTCCCACAATGACGTGCTGAAG
CTGTGCGACTTCGGCTTTGCCCGGCAGCTGAGCGAGGGCAACAATGCCCAGTACACAGAGTAT
GTGGCCACCCGCTGGTACAGAAGCCCCGAGCTGCTGCTGGGCGCCCCCTATGGCAAGAGCGTG
GATATGTGGTCCGTGGGCTGCATCCTGGGCGAGCTGTCTGATGGCCAGCCTCTGTTCCCAGGC
GAGAGCGAGATCGACCAGCTGTTTACCATCCAGAAGGTGCTGGGCCCTCTGCCAAGCGAGCAG
ATGAAGCTGTTCTACTCCAACCCAAGGTTCCACGGCCTGAGGTTTCCAGCCGTGAATCACCCT
CAGAGCCTGGAGCGCCGGTATCTGGGCATCCTGAACTCCGTGCTGCTGGACCTGATGAAGAAC
CTGCTGAAGCTGGACCCCGCCGACAGATACCTGACCGAGCAGTGTCTGAATCACCCTACATTT
CAGACCCAGAGACTGCTGGATAGGAGCCCTTCCCGCTCTGCCAAGCGGAAGCCATATCACGTG
GAGAGCAGCACCCTGTCCAATCGCAACCAGGCCGGCAAGTCTACAGCCCTGCAGAGCCACCAC
CGGAGCAACTCCAAGGATATCCAGCAGCTGTCCGTGGGCCTGCCTAGGGCCGACGAGGGCCTG
CCAGCAAACGAGAGCTTCCTGAATGGAAACCTGGCAGGAGCCTCTCTGAGCCCACTGCACACA
AAGACCTACCAGGCCTCTAGCCAGCCCGGCTCCACATCTAAGGACCTGACCAACAATAACATC
CCACACCTGCTGTCTCCCAAGGAGGCCAAGAGCAAGACCGAGTTCGACTTCAACATCGACCCA
AAGCCTAGCGAGGGACCTGGCACAAAGTATCTGAAGAGCAACAGCCGGAGCCAGCAGAATAGG
CACTCCTTCATGGAGTCCTCTCAGTCTAAGGCCGGCACCCTGCAGCCAAACGAGAAGCAGAGC
AGGCACTCCTACATCGACACCATCCCACAGAGCAGCCGGAGCCCCTCCTATCGGACAAAGGCC
AAGTCTCACGGCGCCCTGTCTGATAGCAAGTCCGTGTCTAATCTGAGCGAGGCCAGAGCCCAG
ATCGCAGAGCCCAGCACCTCCAGGTACTTTCCTTCTAGCTGTCTGGATCTGAACTCTCCTACA
AGCCCAACACCCACCAGACACAGCGACACAAGGACCCTGCTGTCTCCAAGCGGCAGAAATAAC
AGGAACGAGGGCACCCTGGACAGCCGGCGGACCACAACCAGGCACAGCAAGACAATGGAGGAG
CTGAAGCTGCCAGAGCACATGGATTCCTCTCACTCCCACTCTCTGAGCGCCCCCCACGAGTCC
TTCTCTTACGGCCTGGGCTATACCTCCCCCTTCAGCAGCCAGCAGCGCCCCCACCGGCACTCT
ATGTACGTGACAAGAGATAAGGTGAGGGCAAAGGGCCTGGACGGCAGCCTGTCCATCGGACAG
GGAATGGCAGCCCGGGCCAACTCCCTGCAGCTGCTGTCTCCTCAGCCAGGAGAGCAGCTGCCA
CCAGAGATGACCGTGGCACGGAGCAGCGTGAAGGAGACAAGCAGGGAGGGCACCTCCTCTTTC
CACACAAGACAGAAGTCCGAGGGCGGCGTGTATCACGATCCCCACTCTGACGATGGCACAGCC
CCTAAGGAGAACAGGCACCTGTACAATGACCCCGTGCCTAGGAGGGTGGGCTCCTTCTATCGC
GTGCCATCTCCCCGGCCTGATAATAGCTTTCACGAGAATAACGTGAGCACCCGGGTGAGCAGC
CTGCCATCTGAGTCTAGCTCCGGCACAAACCACTCTAAGAGGCAGCCCGCCTTTGACCCTTGG
AAGAGCCCAGAGCAGATCTCTCACAGCGAGCAGCTGAAGGAGAAGGAGAAGCAGGGCTTCTTT
CGCAGCATGAAGAAGAAGAAGAAGAAGAGCCAGACCGTGCCTAACTCCGATTCTCCAGACCTG
CTGACCCTGCAGAAGTCCATCCACAGCGCCTCCACACCCTCTAGCAGACCTAAGGAGTGGAGG
CCTGAGAAGATCAGCGACCTGCAGACCCAGAGCCAGCCACTGAAGTCCCTGCGGAAGCTGCTG
CACCTGTCCTCTGCCAGCAACCACCCAGCCAGCTCCGATCCAAGGTTCCAGCCCCTGACAGCC
CAGCAGACCAAGAACAGCTTCAGCGAGATCAGAATCCACCCTCTGTCCCAGGCCTCTGGAGGC
TCTAGCAACATCAGGCAGGAGCCAGCACCAAAGGGCCGGCCCGCCCTGCAGCTGCCTGGCCAG
ATGGACCCAGGCTGGCACGTGTCCTCTGTGACAAGATCCGCCACCGAGGGCCCATCCTACTCT
GAGCAGCTGGGAGCAAAGAGCGGACCTAATGGACACCCATATCAGAGGACCCAGAGATCCAGG

[chemical structure]

TTCCAGGGCGATTATAAGGACCACGATGGCGACTACAAGGACCACGACATTGACTACAAGGAC
GACGACGATAAAGACGGAGCACCCCATCACCACCACCATCATTGA
DNA sequence for CDKL5_107[1-3,5-7NQ] (human optimized)
SEQ ID NO: 133
AAGATCCCCAATATCGGCAACGTGATGAATAAGTTCGAGATCCTGGGAGTGGTGGGAGAGGGA
GCCTACGGCGTGGTGCTGAAGTGCAGACACAAGGAGACACACGAGATCGTGGCCATCAAGAAG
TTTAAGGACAGCGAGGAGAATGAGGAGGTGAAGGAGACAACCCTGCGCGAGCTGAAGATGCTG
CGGACACTGAAGCAGGAGAACATCGTGGAGCTGAAGGAGGCCTTCCGGAGAAGGGGCAAGCTG
TACCTGGTGTTTGAGTATGTGGAGAAGAACATGCTGGAGCTGCTGGAGGAGATGCCTAATGGC
GTGCCCCCTGAGAAGGTGAAGTCCTACATCTATCAGCTGATCAAGGCCATCCACTGGTGCCAC
AAGAACGATATCGTGCACCGCGACATCAAGCCCGAGAACCTGCTGATCTCCCACAATGACGTG
CTGAAGCTGTGCGACTTCGGCTTTGCCCGGCAGCTGAGCGAGGGCAACAATGCCCAGTACACA
GAGTATGTGGCCACCCGCTGGTACAGAAGCCCCGAGCTGCTGCTGGGCGCCCCCTATGGCAAG
AGCGTGGATATGTGGTCCGTGGGCTGCATCCTGGGCGAGCTGTCTGATGGCCAGCCTCTGTTC
CCAGGCGAGAGCGAGATCGACCAGCTGTTTACCATCCAGAAGGTGCTGGGCCCTCTGCCAAGC
GAGCAGATGAAGCTGTTCTACTCCAACCCAAGGTTCCACGGCCTGAGGTTTCCAGCCGTGAAT
CACCCTCAGAGCCTGGAGCGCCGGTATCTGGGCATCCTGAACTCCGTGCTGCTGGACCTGATG
AAGAACCTGCTGAAGCTGGACCCCGCCGACAGATACCTGACCGAGCAGTGTCTGAATCACCCT
ACATTTCAGACCCAGAGACTGCTGGATAGGAGCCCTTCCCGCTCTGCCAAGCGGAAGCCATAT
CACGTGGAGAGCAGCACCCTGTCCAATCGCAACCAGGCCGGCAAGTCTACAGCCCTGCAGAGC
CACCACCGGAGCAACTCCAAGGATATCCAGCAGCTGTCCGTGGGCCTGCCTAGGGCCGACGAG
GGCCTGCCAGCAAACGAGAGCTTCCTGAATGGAAACCTGGCAGGAGCCTCTCTGAGCCCACTG
CACACAAAGACCTACCAGGCCTCTAGCCAGCCCGGCTCCACATCTAAGGACCTGACCAACAAT
AACATCCCACACCTGCTGTCTCCCAAGGAGGCCAAGAGCAAGACCGAGTTCGACTTCAACATC
GACCCAAAGCCTAGCGAGGGACCTGGCACAAAGTATCTGAAGAGCAACAGCCGGAGCCAGCAG
AATAGGCACTCCTTCATGGAGTCCTCTCAGTCTAAGGCCGGCACCCTGCAGCCAAACGAGAAG
CAGAGCAGGCACTCCTACATCGACACCATCCCACAGAGCAGCCGGAGCCCCTCCTATCGGACA
AAGGCCAAGTCTCACGGCGCCCTGTCTGATAGCAAGTCCGTGTCTAATCTGAGCGAGGCCAGA
GCCCAGATCGCAGAGCCCAGCACCTCCAGGTACTTTCCTTCTAGCTGTCTGGATCTGAACTCT
CCTACAAGCCCAACACCCACCAGACACAGCGACACAAGGACCCTGCTGTCTCCAAGCGGCAGA
AATAACAGGAACGAGGGCACCCTGGACAGCCGGCGGACCACAACCAGGCACAGCAAGACAATG
GAGGAGCTGAAGCTGCCAGAGCACATGGATTCCTCTCACTCCCACTCTCTGAGCGCCCCCCAC
GAGTCCTTCTCTTACGGCCTGGGCTATACCTCCCCCTTCAGCAGCCAGCAGCGCCCCCACCGG
CACTCTATGTACGTGACAAGAGATAAGGTGAGGGCAAAGGGCCTGGACGGCAGCCTGTCCATC
GGACAGGGAATGGCAGCCCGGGCCAACTCCCTGCAGCTGCTGTCTCCTCAGCCAGGAGAGCAG
CTGCCACCAGAGATGACCGTGGCACGGAGCAGCGTGAAGGAGACAAGCAGGGAGGGCACCTCC
TCTTTCCACACAAGACAGAAGTCCGAGGGCGGCGTGTATCACGATCCCCACTCTGACGATGGC
ACAGCCCCTAAGGAGAACAGGCACCTGTACAATGACCCCGTGCCTAGGAGGGTGGGCTCCTTC
TATCGCGTGCCATCTCCCCGGCCTGATAATAGCTTTCACGAGAATAACGTGAGCACCCGGGTG
AGCAGCCTGCCATCTGAGTCTAGCTCCGGCACAAACCACTCTAAGAGGCAGCCCGCCTTTGAC
CCTTGGAAGAGCCCAGAGCAGATCTCTCACAGCGAGCAGCTGAAGGAGAAGGAGAAGCAGGGC
TTCTTTCGCAGCATGAAGAAGAAGAAGAAGAAGAGCCAGACCGTGCCTAACTCCGATTCTCCA
GACCTGCTGACCCTGCAGAAGTCCATCCACAGCGCCTCCACACCCTCTAGCAGACCTAAGGAG
TGGAGGCCTGAGAAGATCAGCGACCTGCAGACCCAGAGCCAGCCACTGAAGTCCCTGCGGAAG
CTGCTGCACCTGTCCTCTGCCAGCAACCACCCAGCCAGCTCCGATCCAAGGTTCCAGCCCCTG
ACAGCCCAGCAGACCAAGAACAGCTTCAGCGAGATCAGAATCCACCCTCTGTCCCAGGCCTCT
GGAGGCTCTAGCAACATCAGGCAGGAGCCAGCACCAAAGGGCCGGCCCGCCCTGCAGCTGCCT
GGCCAGATGGACCCAGGCTGGCACGTGTCCTCTGTGACAAGATCCGCCACCGAGGGCCCATCC
TACTCTGAGCAGCTGGGAGCAAAGAGCGGACCTAATGGACACCCATATCAGAGGACCCAGAGA
TCCAGGATGCCCAATCTGAACGATCTGAAGGAGACAGCCCTG
DNA sequence for MBIP-TATκ28-CDKL5_107-FH [1-4,6-7NQ]
(human optimized)
SEQ ID NO: 134
ATGAAGCTGTCCCTGGTGGCCGCTATGCTGCTGCTGCTGTCTCTGGTCGCTGCCATGTTATTA
CTGCTGTCTGCCGCTAGGGCCGGGGACGCAGCACAGCCCGCAAGAAGAGCAAGAAGAACTAAA
CTGGCCGCTTACGCAAGGAAGGCAGCAAGACAGGCAAGAGCAGGCGGCGGCGGCTCCAAGATC
CCCAATATCGGCAACGTGATGAATAAGTTCGAGATCCTGGGAGTGGTGGGAGAGGGAGCCTAC
GGCGTGGTGCTGAAGTGCAGACACAAGGAGACACACGAGATCGTGGCCATCAAGAAGTTTAAG
GACAGCGAGGAGAATGAGGAGGTGAAGGAGACAACCCTGCGCGAGCTGAAGATGCTGCGGACA
CTGAAGCAGGAGAACATCGTGGAGCTGAAGGAGGCCTTCCGGAGAAGGGGCAAGCTGTACCTG
GTGTTTGAGTATGTGGAGAAGAACATGCTGGAGCTGCTGGAGGAGATGCCTAATGGCGTGCCC
CCTGAGAAGGTGAAGTCCTACATCTATCAGCTGATCAAGGCCATCCACTGGTGCCACAAGAAC
GATATCGTGCACCGCGACATCAAGCCCGAGAACCTGCTGATCTCCCACAATGACGTGCTGAAG
CTGTGCGACTTCGGCTTTGCCCGGCAGCTGAGCGAGGGCAACAATGCCCAGTACACAGAGTAT
GTGGCCACCCGCTGGTACAGAAGCCCCGAGCTGCTGCTGGGCGCCCCCTATGGCAAGAGCGTG
GATATGTGGTCCGTGGGCTGCATCCTGGGCGAGCTGTCTGATGGCCAGCCTCTGTTCCCAGGC
GAGAGCGAGATCGACCAGCTGTTTACCATCCAGAAGGTGCTGGGCCCTCTGCCAAGCGAGCAG
ATGAAGCTGTTCTACTCCAACCCAAGGTTCCACGGCCTGAGGTTTCCAGCCGTGAATCACCCT
CAGAGCCTGGAGCGCCGGTATCTGGGCATCCTGAACTCCGTGCTGCTGGACCTGATGAAGAAC
CTGCTGAAGCTGGACCCCGCCGACAGATACCTGACCGAGCAGTGTCTGAATCACCCTACATTT
CAGACCCAGAGACTGCTGGATAGGAGCCCTTCCCGCTCTGCCAAGCGGAAGCCATATCACGTG
GAGAGCAGCACCCTGTCCAATCGCAACCAGGCCGGCAAGTCTACAGCCCTGCAGAGCCACCAC
CGGAGCAACTCCAAGGATATCCAGCAGCTGTCCGTGGGCCTGCCTAGGGCCGACGAGGGCCTG
CCAGCAAACGAGAGCTTCCTGAATGGAAACCTGGCAGGAGCCTCTCTGAGCCCACTGCACACA
AAGACCTACCAGGCCTCTAGCCAGCCCGGCTCCACATCTAAGGACCTGACCAACAATAACATC
CCACACCTGCTGTCTCCCAAGGAGGCCAAGAGCAAGACCGAGTTCGACTTCAACATCGACCCA
AAGCCTAGCGAGGGACCTGGCACAAAGTATCTGAAGAGCAACAGCCGGAGCCAGCAGAATAGG
CACTCCTTCATGGAGTCCTCTCAGTCTAAGGCCGGCACCCTGCAGCCAAACGAGAAGCAGAGC
AGGCACTCCTACATCGACACCATCCCACAGAGCAGCCGGAGCCCCTCCTATCGGACAAAGGCC
AAGTCTCACGGCGCCCTGTCTGATAGCAAGTCCGTGTCTCAGCTGAGCGAGGCCAGAGCCCAG
ATCGCAGAGCCCAGCACCTCCAGGTACTTTCCTTCTAGCTGTCTGGATCTGAACTCTCCTACA
AGCCCAACACCCACCAGACACAGCGACACAAGGACCCTGCTGTCTCCAAGCGGCAGAAATAAC
AGGAACGAGGGCACCCTGGACAGCCGGCGGACCACAACCAGGCACAGCAAGACAATGGAGGAG
CTGAAGCTGCCAGAGCACATGGATTCCTCTCACTCCCACTCTCTGAGCGCCCCCCACGAGTCC
TTCTCTTACGGCCTGGGCTATACCTCCCCCTTCAGCAGCCAGCAGCGCCCCCACCGGCACTCT
ATGTACGTGACAAGAGATAAGGTGAGGGCAAAGGGCCTGGACGGCAGCCTGTCCATCGGACAG
GGAATGGCAGCCCGGGCCAACTCCCTGCAGCTGCTGTCTCCTCAGCCAGGAGAGCAGCTGCCA
CCAGAGATGACCGTGGCACGGAGCAGCGTGAAGGAGACAAGCAGGGAGGGCACCTCCTCTTTC
CACACAAGACAGAAGTCCGAGGGCGGCGTGTATCACGATCCCCACTCTGACGATGGCACAGCC
CCTAAGGAGAACAGGCACCTGTACAATGACCCCGTGCCTAGGAGGGTGGGCTCCTTCTATCGC
GTGCCATCTCCCCGGCCTGATAATAGCTTTCACGAGAATAACGTGAGCACCCGGGTGAGCAGC
CTGCCATCTGAGTCTAGCTCCGGCACAAACCACTCTAAGAGGCAGCCCGCCTTTGACCCTTGG
AAGAGCCCAGAGAATATCTCTCACAGCGAGCAGCTGAAGGAGAAGGAGAAGCAGGGCTTCTTT
CGCAGCATGAAGAAGAAGAAGAAGAAGAGCCAGACCGTGCCTAACTCCGATTCTCCAGACCTG
CTGACCCTGCAGAAGTCCATCCACAGCGCCTCCACACCCTCTAGCAGACCTAAGGAGTGGAGG
CCTGAGAAGATCAGCGACCTGCAGACCCAGAGCCAGCCACTGAAGTCCCTGCGGAAGCTGCTG
CACCTGTCCTCTGCCAGCAACCACCCAGCCAGCTCCGATCCAAGGTTCCAGCCCCTGACAGCC
CAGCAGACCAAGAACAGCTTCAGCGAGATCAGAATCCACCCTCTGTCCCAGGCCTCTGGAGGC
TCTAGCAACATCAGGCAGGAGCCAGCACCAAAGGGCCGGCCCGCCCTGCAGCTGCCTGGCCAG
ATGGACCCAGGCTGGCACGTGTCCTCTGTGACAAGATCCGCCACCGAGGGCCCATCCTACTCT
GAGCAGCTGGGAGCAAAGAGCGGACCTAATGGACACCCATATCAGAGGACCCAGAGATCCAGG

[chemical structure]

TTCCAGGGCGATTATAAGGACCACGATGGCGACTACAAGGACCACGACATTGACTACAAGGAC
GACGACGATAAAGACGGAGCACCCCATCACCACCACCATCATTGA
DNA sequence for CDKL5_107[1-4,6-7NQ] (human optimized)
SEQ ID NO: 135
AAGATCCCCAATATCGGCAACGTGATGAATAAGTTCGAGATCCTGGGAGTGGTGGGAGAGGGA
GCCTACGGCGTGGTGCTGAAGTGCAGACACAAGGAGACACACGAGATCGTGGCCATCAAGAAG
TTTAAGGACAGCGAGGAGAATGAGGAGGTGAAGGAGACAACCCTGCGCGAGCTGAAGATGCTG
CGGACACTGAAGCAGGAGAACATCGTGGAGCTGAAGGAGGCCTTCCGGAGAAGGGGCAAGCTG
TACCTGGTGTTTGAGTATGTGGAGAAGAACATGCTGGAGCTGCTGGAGGAGATGCCTAATGGC
GTGCCCCCTGAGAAGGTGAAGTCCTACATCTATCAGCTGATCAAGGCCATCCACTGGTGCCAC
AAGAACGATATCGTGCACCGCGACATCAAGCCCGAGAACCTGCTGATCTCCCACAATGACGTG
CTGAAGCTGTGCGACTTCGGCTTTGCCCGGCAGCTGAGCGAGGGCAACAATGCCCAGTACACA
GAGTATGTGGCCACCCGCTGGTACAGAAGCCCCGAGCTGCTGCTGGGCGCCCCCTATGGCAAG
AGCGTGGATATGTGGTCCGTGGGCTGCATCCTGGGCGAGCTGTCTGATGGCCAGCCTCTGTTC
CCAGGCGAGAGCGAGATCGACCAGCTGTTTACCATCCAGAAGGTGCTGGGCCCTCTGCCAAGC
GAGCAGATGAAGCTGTTCTACTCCAACCCAAGGTTCCACGGCCTGAGGTTTCCAGCCGTGAAT
CACCCTCAGAGCCTGGAGCGCCGGTATCTGGGCATCCTGAACTCCGTGCTGCTGGACCTGATG
AAGAACCTGCTGAAGCTGGACCCCGCCGACAGATACCTGACCGAGCAGTGTCTGAATCACCCT
ACATTTCAGACCCAGAGACTGCTGGATAGGAGCCCTTCCCGCTCTGCCAAGCGGAAGCCATAT
CACGTGGAGAGCAGCACCCTGTCCAATCGCAACCAGGCCGGCAAGTCTACAGCCCTGCAGAGC
CACCACCGGAGCAACTCCAAGGATATCCAGCAGCTGTCCGTGGGCCTGCCTAGGGCCGACGAG
GGCCTGCCAGCAAACGAGAGCTTCCTGAATGGAAACCTGGCAGGAGCCTCTCTGAGCCCACTG
CACACAAAGACCTACCAGGCCTCTAGCCAGCCCGGCTCCACATCTAAGGACCTGACCAACAAT
AACATCCCACACCTGCTGTCTCCCAAGGAGGCCAAGAGCAAGACCGAGTTCGACTTCAACATC
GACCCAAAGCCTAGCGAGGGACCTGGCACAAAGTATCTGAAGAGCAACAGCCGGAGCCAGCAG
AATAGGCACTCCTTCATGGAGTCCTCTCAGTCTAAGGCCGGCACCCTGCAGCCAAACGAGAAG
CAGAGCAGGCACTCCTACATCGACACCATCCCACAGAGCAGCCGGAGCCCCTCCTATCGGACA
AAGGCCAAGTCTCACGGCGCCCTGTCTGATAGCAAGTCCGTGTCTCAGCTGAGCGAGGCCAGA
GCCCAGATCGCAGAGCCCAGCACCTCCAGGTACTTTCCTTCTAGCTGTCTGGATCTGAACTCT
CCTACAAGCCCAACACCCACCAGACACAGCGACACAAGGACCCTGCTGTCTCCAAGCGGCAGA
AATAACAGGAACGAGGGCACCCTGGACAGCCGGCGGACCACAACCAGGCACAGCAAGACAATG
GAGGAGCTGAAGCTGCCAGAGCACATGGATTCCTCTCACTCCCACTCTCTGAGCGCCCCCCAC
GAGTCCTTCTCTTACGGCCTGGGCTATACCTCCCCCTTCAGCAGCCAGCAGCGCCCCCACCGG
CACTCTATGTACGTGACAAGAGATAAGGTGAGGGCAAAGGGCCTGGACGGCAGCCTGTCCATC
GGACAGGGAATGGCAGCCCGGGCCAACTCCCTGCAGCTGCTGTCTCCTCAGCCAGGAGAGCAG
CTGCCACCAGAGATGACCGTGGCACGGAGCAGCGTGAAGGAGACAAGCAGGGAGGGCACCTCC
TCTTTCCACACAAGACAGAAGTCCGAGGGCGGCGTGTATCACGATCCCCACTCTGACGATGGC
ACAGCCCCTAAGGAGAACAGGCACCTGTACAATGACCCCGTGCCTAGGAGGGTGGGCTCCTTC
TATCGCGTGCCATCTCCCCGGCCTGATAATAGCTTTCACGAGAATAACGTGAGCACCCGGGTG
AGCAGCCTGCCATCTGAGTCTAGCTCCGGCACAAACCACTCTAAGAGGCAGCCCGCCTTTGAC
CCTTGGAAGAGCCCAGAGAATATCTCTCACAGCGAGCAGCTGAAGGAGAAGGAGAAGCAGGGC
TTCTTTCGCAGCATGAAGAAGAAGAAGAAGAAGAGCCAGACCGTGCCTAACTCCGATTCTCCA
GACCTGCTGACCCTGCAGAAGTCCATCCACAGCGCCTCCACACCCTCTAGCAGACCTAAGGAG
TGGAGGCCTGAGAAGATCAGCGACCTGCAGACCCAGAGCCAGCCACTGAAGTCCCTGCGGAAG
CTGCTGCACCTGTCCTCTGCCAGCAACCACCCAGCCAGCTCCGATCCAAGGTTCCAGCCCCTG
ACAGCCCAGCAGACCAAGAACAGCTTCAGCGAGATCAGAATCCACCCTCTGTCCCAGGCCTCT
GGAGGCTCTAGCAACATCAGGCAGGAGCCAGCACCAAAGGGCCGGCCCGCCCTGCAGCTGCCT
GGCCAGATGGACCCAGGCTGGCACGTGTCCTCTGTGACAAGATCCGCCACCGAGGGCCCATCC
TACTCTGAGCAGCTGGGAGCAAAGAGCGGACCTAATGGACACCCATATCAGAGGACCCAGAGA
TCCAGGATGCCCAATCTGAACGATCTGAAGGAGACAGCCCTG
DNA sequence for MBIP-TATκ28-CDKL5_107-FH [1-5,7NQ]
(human optimized)
SEQ ID NO: 136
ATGAAGCTGTCCCTGGTGGCCGCTATGCTGCTGCTGCTGTCTCTGGTCGCTGCCATGTTATTA
CTGCTGTCTGCCGCTAGGGCCGGGGACGCAGCACAGCCCGCAAGAAGAGCAAGAAGAACTAAA
CTGGCCGCTTACGCAAGGAAGGCAGCAAGACAGGCAAGAGCAGGCGGCGGCGGCTCCAAGATC
CCCAATATCGGCAACGTGATGAATAAGTTCGAGATCCTGGGAGTGGTGGGAGAGGGAGCCTAC
GGCGTGGTGCTGAAGTGCAGACACAAGGAGACACACGAGATCGTGGCCATCAAGAAGTTTAAG
GACAGCGAGGAGAATGAGGAGGTGAAGGAGACAACCCTGCGCGAGCTGAAGATGCTGCGGACA
CTGAAGCAGGAGAACATCGTGGAGCTGAAGGAGGCCTTCCGGAGAAGGGGCAAGCTGTACCTG
GTGTTTGAGTATGTGGAGAAGAACATGCTGGAGCTGCTGGAGGAGATGCCTAATGGCGTGCCC
CCTGAGAAGGTGAAGTCCTACATCTATCAGCTGATCAAGGCCATCCACTGGTGCCACAAGAAC
GATATCGTGCACCGCGACATCAAGCCCGAGAACCTGCTGATCTCCCACAATGACGTGCTGAAG
CTGTGCGACTTCGGCTTTGCCCGGCAGCTGAGCGAGGGCAACAATGCCCAGTACACAGAGTAT
GTGGCCACCCGCTGGTACAGAAGCCCCGAGCTGCTGCTGGGCGCCCCCTATGGCAAGAGCGTG
GATATGTGGTCCGTGGGCTGCATCCTGGGCGAGCTGTCTGATGGCCAGCCTCTGTTCCCAGGC
GAGAGCGAGATCGACCAGCTGTTTACCATCCAGAAGGTGCTGGGCCCTCTGCCAAGCGAGCAG
ATGAAGCTGTTCTACTCCAACCCAAGGTTCCACGGCCTGAGGTTTCCAGCCGTGAATCACCCT
CAGAGCCTGGAGCGCCGGTATCTGGGCATCCTGAACTCCGTGCTGCTGGACCTGATGAAGAAC
CTGCTGAAGCTGGACCCCGCCGACAGATACCTGACCGAGCAGTGTCTGAATCACCCTACATTT
CAGACCCAGAGACTGCTGGATAGGAGCCCTTCCCGCTCTGCCAAGCGGAAGCCATATCACGTG
GAGAGCAGCACCCTGTCCAATCGCAACCAGGCCGGCAAGTCTACAGCCCTGCAGAGCCACCAC
CGGAGCAACTCCAAGGATATCCAGCAGCTGTCCGTGGGCCTGCCTAGGGCCGACGAGGGCCTG
CCAGCAAACGAGAGCTTCCTGAATGGAAACCTGGCAGGAGCCTCTCTGAGCCCACTGCACACA
AAGACCTACCAGGCCTCTAGCCAGCCCGGCTCCACATCTAAGGACCTGACCAACAATAACATC
CCACACCTGCTGTCTCCCAAGGAGGCCAAGAGCAAGACCGAGTTCGACTTCAACATCGACCCA
AAGCCTAGCGAGGGACCTGGCACAAAGTATCTGAAGAGCAACAGCCGGAGCCAGCAGAATAGG
CACTCCTTCATGGAGTCCTCTCAGTCTAAGGCCGGCACCCTGCAGCCAAACGAGAAGCAGAGC
AGGCACTCCTACATCGACACCATCCCACAGAGCAGCCGGAGCCCCTCCTATCGGACAAAGGCC
AAGTCTCACGGCGCCCTGTCTGATAGCAAGTCCGTGTCTCAGCTGAGCGAGGCCAGAGCCCAG
ATCGCAGAGCCCAGCACCTCCAGGTACTTTCCTTCTAGCTGTCTGGATCTGAACTCTCCTACA
AGCCCAACACCCACCAGACACAGCGACACAAGGACCCTGCTGTCTCCAAGCGGCAGAAATAAC
AGGAACGAGGGCACCCTGGACAGCCGGCGGACCACAACCAGGCACAGCAAGACAATGGAGGAG
CTGAAGCTGCCAGAGCACATGGATTCCTCTCACTCCCACTCTCTGAGCGCCCCCCACGAGTCC
TTCTCTTACGGCCTGGGCTATACCTCCCCCTTCAGCAGCCAGCAGCGCCCCCACCGGCACTCT
ATGTACGTGACAAGAGATAAGGTGAGGGCAAAGGGCCTGGACGGCAGCCTGTCCATCGGACAG
GGAATGGCAGCCCGGGCCAACTCCCTGCAGCTGCTGTCTCCTCAGCCAGGAGAGCAGCTGCCA
CCAGAGATGACCGTGGCACGGAGCAGCGTGAAGGAGACAAGCAGGGAGGGCACCTCCTCTTTC
CACACAAGACAGAAGTCCGAGGGCGGCGTGTATCACGATCCCCACTCTGACGATGGCACAGCC
CCTAAGGAGAACAGGCACCTGTACAATGACCCCGTGCCTAGGAGGGTGGGCTCCTTCTATCGC
GTGCCATCTCCCCGGCCTGATAATAGCTTTCACGAGAATAACGTGAGCACCCGGGTGAGCAGC
CTGCCATCTGAGTCTAGCTCCGGCACAAACCACTCTAAGAGGCAGCCCGCCTTTGACCCTTGG
AAGAGCCCAGAGCAGATCTCTCACAGCGAGCAGCTGAAGGAGAAGGAGAAGCAGGGCTTCTTT
CGCAGCATGAAGAAGAAGAAGAAGAAGAGCCAGACCGTGCCTAACTCCGATTCTCCAGACCTG
CTGACCCTGCAGAAGTCCATCCACAGCGCCTCCACACCCTCTAGCAGACCTAAGGAGTGGAGG
CCTGAGAAGATCAGCGACCTGCAGACCCAGAGCCAGCCACTGAAGTCCCTGCGGAAGCTGCTG
CACCTGTCCTCTGCCAGCAACCACCCAGCCAGCTCCGATCCAAGGTTCCAGCCCCTGACAGCC
CAGCAGACCAAGAACAGCTTCAGCGAGATCAGAATCCACCCTCTGTCCCAGGCCTCTGGAGGC
TCTAGCAACATCAGGCAGGAGCCAGCACCAAAGGGCCGGCCCGCCCTGCAGCTGCCTGGCCAG
ATGGACCCAGGCTGGCACGTGTCCTCTGTGACAAGATCCGCCACCGAGGGCCCATCCTACTCT
GAGCAGCTGGGAGCAAAGAGCGGACCTAATGGACACCCATATAACAGGACCCAGAGATCCAGG

[chemical structure]

TTCCAGGGCGATTATAAGGACCACGATGGCGACTACAAGGACCACGACATTGACTACAAGGAC
GACGACGATAAAGACGGAGCACCCCATCACCACCACCATCATTGA
DNA sequence for CDKL5_107[1-5,7NQ] (human optimized)
SEQ ID NO: 137
AAGATCCCCAATATCGGCAACGTGATGAATAAGTTCGAGATCCTGGGAGTGGTGGGAGAGGGA
GCCTACGGCGTGGTGCTGAAGTGCAGACACAAGGAGACACACGAGATCGTGGCCATCAAGAAG
TTTAAGGACAGCGAGGAGAATGAGGAGGTGAAGGAGACAACCCTGCGCGAGCTGAAGATGCTG
CGGACACTGAAGCAGGAGAACATCGTGGAGCTGAAGGAGGCCTTCCGGAGAAGGGGCAAGCTG
TACCTGGTGTTTGAGTATGTGGAGAAGAACATGCTGGAGCTGCTGGAGGAGATGCCTAATGGC
GTGCCCCCTGAGAAGGTGAAGTCCTACATCTATCAGCTGATCAAGGCCATCCACTGGTGCCAC
AAGAACGATATCGTGCACCGCGACATCAAGCCCGAGAACCTGCTGATCTCCCACAATGACGTG
CTGAAGCTGTGCGACTTCGGCTTTGCCCGGCAGCTGAGCGAGGGCAACAATGCCCAGTACACA
GAGTATGTGGCCACCCGCTGGTACAGAAGCCCCGAGCTGCTGCTGGGCGCCCCCTATGGCAAG
AGCGTGGATATGTGGTCCGTGGGCTGCATCCTGGGCGAGCTGTCTGATGGCCAGCCTCTGTTC
CCAGGCGAGAGCGAGATCGACCAGCTGTTTACCATCCAGAAGGTGCTGGGCCCTCTGCCAAGC
GAGCAGATGAAGCTGTTCTACTCCAACCCAAGGTTCCACGGCCTGAGGTTTCCAGCCGTGAAT
CACCCTCAGAGCCTGGAGCGCCGGTATCTGGGCATCCTGAACTCCGTGCTGCTGGACCTGATG
AAGAACCTGCTGAAGCTGGACCCCGCCGACAGATACCTGACCGAGCAGTGTCTGAATCACCCT
ACATTTCAGACCCAGAGACTGCTGGATAGGAGCCCTTCCCGCTCTGCCAAGCGGAAGCCATAT
CACGTGGAGAGCAGCACCCTGTCCAATCGCAACCAGGCCGGCAAGTCTACAGCCCTGCAGAGC
CACCACCGGAGCAACTCCAAGGATATCCAGCAGCTGTCCGTGGGCCTGCCTAGGGCCGACGAG
GGCCTGCCAGCAAACGAGAGCTTCCTGAATGGAAACCTGGCAGGAGCCTCTCTGAGCCCACTG
CACACAAAGACCTACCAGGCCTCTAGCCAGCCCGGCTCCACATCTAAGGACCTGACCAACAAT
AACATCCCACACCTGCTGTCTCCCAAGGAGGCCAAGAGCAAGACCGAGTTCGACTTCAACATC
GACCCAAAGCCTAGCGAGGGACCTGGCACAAAGTATCTGAAGAGCAACAGCCGGAGCCAGCAG
AATAGGCACTCCTTCATGGAGTCCTCTCAGTCTAAGGCCGGCACCCTGCAGCCAAACGAGAAG
CAGAGCAGGCACTCCTACATCGACACCATCCCACAGAGCAGCCGGAGCCCCTCCTATCGGACA
AAGGCCAAGTCTCACGGCGCCCTGTCTGATAGCAAGTCCGTGTCTCAGCTGAGCGAGGCCAGA
GCCCAGATCGCAGAGCCCAGCACCTCCAGGTACTTTCCTTCTAGCTGTCTGGATCTGAACTCT
CCTACAAGCCCAACACCCACCAGACACAGCGACACAAGGACCCTGCTGTCTCCAAGCGGCAGA
AATAACAGGAACGAGGGCACCCTGGACAGCCGGCGGACCACAACCAGGCACAGCAAGACAATG
GAGGAGCTGAAGCTGCCAGAGCACATGGATTCCTCTCACTCCCACTCTCTGAGCGCCCCCCAC
GAGTCCTTCTCTTACGGCCTGGGCTATACCTCCCCCTTCAGCAGCCAGCAGCGCCCCCACCGG
CACTCTATGTACGTGACAAGAGATAAGGTGAGGGCAAAGGGCCTGGACGGCAGCCTGTCCATC
GGACAGGGAATGGCAGCCCGGGCCAACTCCCTGCAGCTGCTGTCTCCTCAGCCAGGAGAGCAG
CTGCCACCAGAGATGACCGTGGCACGGAGCAGCGTGAAGGAGACAAGCAGGGAGGGCACCTCC
TCTTTCCACACAAGACAGAAGTCCGAGGGCGGCGTGTATCACGATCCCCACTCTGACGATGGC
ACAGCCCCTAAGGAGAACAGGCACCTGTACAATGACCCCGTGCCTAGGAGGGTGGGCTCCTTC
TATCGCGTGCCATCTCCCCGGCCTGATAATAGCTTTCACGAGAATAACGTGAGCACCCGGGTG
AGCAGCCTGCCATCTGAGTCTAGCTCCGGCACAAACCACTCTAAGAGGCAGCCCGCCTTTGAC
CCTTGGAAGAGCCCAGAGCAGATCTCTCACAGCGAGCAGCTGAAGGAGAAGGAGAAGCAGGGC
TTCTTTCGCAGCATGAAGAAGAAGAAGAAGAAGAGCCAGACCGTGCCTAACTCCGATTCTCCA
GACCTGCTGACCCTGCAGAAGTCCATCCACAGCGCCTCCACACCCTCTAGCAGACCTAAGGAG
TGGAGGCCTGAGAAGATCAGCGACCTGCAGACCCAGAGCCAGCCACTGAAGTCCCTGCGGAAG
CTGCTGCACCTGTCCTCTGCCAGCAACCACCCAGCCAGCTCCGATCCAAGGTTCCAGCCCCTG
ACAGCCCAGCAGACCAAGAACAGCTTCAGCGAGATCAGAATCCACCCTCTGTCCCAGGCCTCT
GGAGGCTCTAGCAACATCAGGCAGGAGCCAGCACCAAAGGGCCGGCCCGCCCTGCAGCTGCCT
GGCCAGATGGACCCAGGCTGGCACGTGTCCTCTGTGACAAGATCCGCCACCGAGGGCCCATCC
TACTCTGAGCAGCTGGGAGCAAAGAGCGGACCTAATGGACACCCATATAACAGGACCCAGAGA
TCCAGGATGCCCAATCTGAACGATCTGAAGGAGACAGCCCTG
DNA sequence for MBIP-TATκ28-CDKL5_107-FH [1-6NQ]
(human optimized)
SEQ ID NO: 138
ATGAAGCTGTCCCTGGTGGCCGCTATGCTGCTGCTGCTGTCTCTGGTCGCTGCCATGTTATTA
CTGCTGTCTGCCGCTAGGGCCGGGGACGCAGCACAGCCCGCAAGAAGAGCAAGAAGAACTAAA
CTGGCCGCTTACGCAAGGAAGGCAGCAAGACAGGCAAGAGCAGGCGGCGGCGGCTCCAAGATC
CCCAATATCGGCAACGTGATGAATAAGTTCGAGATCCTGGGAGTGGTGGGAGAGGGAGCCTAC
GGCGTGGTGCTGAAGTGCAGACACAAGGAGACACACGAGATCGTGGCCATCAAGAAGTTTAAG
GACAGCGAGGAGAATGAGGAGGTGAAGGAGACAACCCTGCGCGAGCTGAAGATGCTGCGGACA
CTGAAGCAGGAGAACATCGTGGAGCTGAAGGAGGCCTTCCGGAGAAGGGGCAAGCTGTACCTG
GTGTTTGAGTATGTGGAGAAGAACATGCTGGAGCTGCTGGAGGAGATGCCTAATGGCGTGCCC
CCTGAGAAGGTGAAGTCCTACATCTATCAGCTGATCAAGGCCATCCACTGGTGCCACAAGAAC
GATATCGTGCACCGCGACATCAAGCCCGAGAACCTGCTGATCTCCCACAATGACGTGCTGAAG
CTGTGCGACTTCGGCTTTGCCCGGCAGCTGAGCGAGGGCAACAATGCCCAGTACACAGAGTAT
GTGGCCACCCGCTGGTACAGAAGCCCCGAGCTGCTGCTGGGCGCCCCCTATGGCAAGAGCGTG
GATATGTGGTCCGTGGGCTGCATCCTGGGCGAGCTGTCTGATGGCCAGCCTCTGTTCCCAGGC
GAGAGCGAGATCGACCAGCTGTTTACCATCCAGAAGGTGCTGGGCCCTCTGCCAAGCGAGCAG
ATGAAGCTGTTCTACTCCAACCCAAGGTTCCACGGCCTGAGGTTTCCAGCCGTGAATCACCCT
CAGAGCCTGGAGCGCCGGTATCTGGGCATCCTGAACTCCGTGCTGCTGGACCTGATGAAGAAC
CTGCTGAAGCTGGACCCCGCCGACAGATACCTGACCGAGCAGTGTCTGAATCACCCTACATTT
CAGACCCAGAGACTGCTGGATAGGAGCCCTTCCCGCTCTGCCAAGCGGAAGCCATATCACGTG
GAGAGCAGCACCCTGTCCAATCGCAACCAGGCCGGCAAGTCTACAGCCCTGCAGAGCCACCAC
CGGAGCAACTCCAAGGATATCCAGCAGCTGTCCGTGGGCCTGCCTAGGGCCGACGAGGGCCTG
CCAGCAAACGAGAGCTTCCTGAATGGAAACCTGGCAGGAGCCTCTCTGAGCCCACTGCACACA
AAGACCTACCAGGCCTCTAGCCAGCCCGGCTCCACATCTAAGGACCTGACCAACAATAACATC
CCACACCTGCTGTCTCCCAAGGAGGCCAAGAGCAAGACCGAGTTCGACTTCAACATCGACCCA
AAGCCTAGCGAGGGACCTGGCACAAAGTATCTGAAGAGCAACAGCCGGAGCCAGCAGAATAGG
CACTCCTTCATGGAGTCCTCTCAGTCTAAGGCCGGCACCCTGCAGCCAAACGAGAAGCAGAGC
AGGCACTCCTACATCGACACCATCCCACAGAGCAGCCGGAGCCCCTCCTATCGGACAAAGGCC
AAGTCTCACGGCGCCCTGTCTGATAGCAAGTCCGTGTCTCAGCTGAGCGAGGCCAGAGCCCAG
ATCGCAGAGCCCAGCACCTCCAGGTACTTTCCTTCTAGCTGTCTGGATCTGAACTCTCCTACA
AGCCCAACACCCACCAGACACAGCGACACAAGGACCCTGCTGTCTCCAAGCGGCAGAAATAAC
AGGAACGAGGGCACCCTGGACAGCCGGCGGACCACAACCAGGCACAGCAAGACAATGGAGGAG
CTGAAGCTGCCAGAGCACATGGATTCCTCTCACTCCCACTCTCTGAGCGCCCCCCACGAGTCC
TTCTCTTACGGCCTGGGCTATACCTCCCCCTTCAGCAGCCAGCAGCGCCCCCACCGGCACTCT
ATGTACGTGACAAGAGATAAGGTGAGGGCAAAGGGCCTGGACGGCAGCCTGTCCATCGGACAG
GGAATGGCAGCCCGGGCCAACTCCCTGCAGCTGCTGTCTCCTCAGCCAGGAGAGCAGCTGCCA
CCAGAGATGACCGTGGCACGGAGCAGCGTGAAGGAGACAAGCAGGGAGGGCACCTCCTCTTTC
CACACAAGACAGAAGTCCGAGGGCGGCGTGTATCACGATCCCCACTCTGACGATGGCACAGCC
CCTAAGGAGAACAGGCACCTGTACAATGACCCCGTGCCTAGGAGGGTGGGCTCCTTCTATCGC
GTGCCATCTCCCCGGCCTGATAATAGCTTTCACGAGAATAACGTGAGCACCCGGGTGAGCAGC
CTGCCATCTGAGTCTAGCTCCGGCACAAACCACTCTAAGAGGCAGCCCGCCTTTGACCCTTGG
AAGAGCCCAGAGCAGATCTCTCACAGCGAGCAGCTGAAGGAGAAGGAGAAGCAGGGCTTCTTT
CGCAGCATGAAGAAGAAGAAGAAGAAGAGCCAGACCGTGCCTAACTCCGATTCTCCAGACCTG
CTGACCCTGCAGAAGTCCATCCACAGCGCCTCCACACCCTCTAGCAGACCTAAGGAGTGGAGG
CCTGAGAAGATCAGCGACCTGCAGACCCAGAGCCAGCCACTGAAGTCCCTGCGGAAGCTGCTG
CACCTGTCCTCTGCCAGCAACCACCCAGCCAGCTCCGATCCAAGGTTCCAGCCCCTGACAGCC
CAGCAGACCAAGAACAGCTTCAGCGAGATCAGAATCCACCCTCTGTCCCAGGCCTCTGGAGGC
TCTAGCAACATCAGGCAGGAGCCAGCACCAAAGGGCCGGCCCGCCCTGCAGCTGCCTGGCCAG
ATGGACCCAGGCTGGCACGTGTCCTCTGTGACAAGATCCGCCACCGAGGGCCCATCCTACTCT
GAGCAGCTGGGAGCAAAGAGCGGACCTAATGGACACCCATATCAGAGGACCAATAGATCCAGG

[chemical structure]

TTCCAGGGCGATTATAAGGACCACGATGGCGACTACAAGGACCACGACATTGACTACAAGGAC
GACGACGATAAAGACGGAGCACCCCATCACCACCACCATCATTGA
DNA sequence for CDKL5_107[1-6NQ] (human optimized)
SEQ ID NO: 139
AAGATCCCCAATATCGGCAACGTGATGAATAAGTTCGAGATCCTGGGAGTGGTGGGAGAGGGA
GCCTACGGCGTGGTGCTGAAGTGCAGACACAAGGAGACACACGAGATCGTGGCCATCAAGAAG
TTTAAGGACAGCGAGGAGAATGAGGAGGTGAAGGAGACAACCCTGCGCGAGCTGAAGATGCTG
CGGACACTGAAGCAGGAGAACATCGTGGAGCTGAAGGAGGCCTTCCGGAGAAGGGGCAAGCTG
TACCTGGTGTTTGAGTATGTGGAGAAGAACATGCTGGAGCTGCTGGAGGAGATGCCTAATGGC
GTGCCCCCTGAGAAGGTGAAGTCCTACATCTATCAGCTGATCAAGGCCATCCACTGGTGCCAC
AAGAACGATATCGTGCACCGCGACATCAAGCCCGAGAACCTGCTGATCTCCCACAATGACGTG
CTGAAGCTGTGCGACTTCGGCTTTGCCCGGCAGCTGAGCGAGGGCAACAATGCCCAGTACACA
GAGTATGTGGCCACCCGCTGGTACAGAAGCCCCGAGCTGCTGCTGGGCGCCCCCTATGGCAAG
AGCGTGGATATGTGGTCCGTGGGCTGCATCCTGGGCGAGCTGTCTGATGGCCAGCCTCTGTTC
CCAGGCGAGAGCGAGATCGACCAGCTGTTTACCATCCAGAAGGTGCTGGGCCCTCTGCCAAGC
GAGCAGATGAAGCTGTTCTACTCCAACCCAAGGTTCCACGGCCTGAGGTTTCCAGCCGTGAAT
CACCCTCAGAGCCTGGAGCGCCGGTATCTGGGCATCCTGAACTCCGTGCTGCTGGACCTGATG
AAGAACCTGCTGAAGCTGGACCCCGCCGACAGATACCTGACCGAGCAGTGTCTGAATCACCCT
ACATTTCAGACCCAGAGACTGCTGGATAGGAGCCCTTCCCGCTCTGCCAAGCGGAAGCCATAT
CACGTGGAGAGCAGCACCCTGTCCAATCGCAACCAGGCCGGCAAGTCTACAGCCCTGCAGAGC
CACCACCGGAGCAACTCCAAGGATATCCAGCAGCTGTCCGTGGGCCTGCCTAGGGCCGACGAG
GGCCTGCCAGCAAACGAGAGCTTCCTGAATGGAAACCTGGCAGGAGCCTCTCTGAGCCCACTG
CACACAAAGACCTACCAGGCCTCTAGCCAGCCCGGCTCCACATCTAAGGACCTGACCAACAAT
AACATCCCACACCTGCTGTCTCCCAAGGAGGCCAAGAGCAAGACCGAGTTCGACTTCAACATC
GACCCAAAGCCTAGCGAGGGACCTGGCACAAAGTATCTGAAGAGCAACAGCCGGAGCCAGCAG
AATAGGCACTCCTTCATGGAGTCCTCTCAGTCTAAGGCCGGCACCCTGCAGCCAAACGAGAAG
CAGAGCAGGCACTCCTACATCGACACCATCCCACAGAGCAGCCGGAGCCCCTCCTATCGGACA
AAGGCCAAGTCTCACGGCGCCCTGTCTGATAGCAAGTCCGTGTCTCAGCTGAGCGAGGCCAGA
GCCCAGATCGCAGAGCCCAGCACCTCCAGGTACTTTCCTTCTAGCTGTCTGGATCTGAACTCT
CCTACAAGCCCAACACCCACCAGACACAGCGACACAAGGACCCTGCTGTCTCCAAGCGGCAGA
AATAACAGGAACGAGGGCACCCTGGACAGCCGGCGGACCACAACCAGGCACAGCAAGACAATG
GAGGAGCTGAAGCTGCCAGAGCACATGGATTCCTCTCACTCCCACTCTCTGAGCGCCCCCCAC
GAGTCCTTCTCTTACGGCCTGGGCTATACCTCCCCCTTCAGCAGCCAGCAGCGCCCCCACCGG
CACTCTATGTACGTGACAAGAGATAAGGTGAGGGCAAAGGGCCTGGACGGCAGCCTGTCCATC
GGACAGGGAATGGCAGCCCGGGCCAACTCCCTGCAGCTGCTGTCTCCTCAGCCAGGAGAGCAG
CTGCCACCAGAGATGACCGTGGCACGGAGCAGCGTGAAGGAGACAAGCAGGGAGGGCACCTCC
TCTTTCCACACAAGACAGAAGTCCGAGGGCGGCGTGTATCACGATCCCCACTCTGACGATGGC
ACAGCCCCTAAGGAGAACAGGCACCTGTACAATGACCCCGTGCCTAGGAGGGTGGGCTCCTTC
TATCGCGTGCCATCTCCCCGGCCTGATAATAGCTTTCACGAGAATAACGTGAGCACCCGGGTG
AGCAGCCTGCCATCTGAGTCTAGCTCCGGCACAAACCACTCTAAGAGGCAGCCCGCCTTTGAC
CCTTGGAAGAGCCCAGAGCAGATCTCTCACAGCGAGCAGCTGAAGGAGAAGGAGAAGCAGGGC
TTCTTTCGCAGCATGAAGAAGAAGAAGAAGAAGAGCCAGACCGTGCCTAACTCCGATTCTCCA
GACCTGCTGACCCTGCAGAAGTCCATCCACAGCGCCTCCACACCCTCTAGCAGACCTAAGGAG
TGGAGGCCTGAGAAGATCAGCGACCTGCAGACCCAGAGCCAGCCACTGAAGTCCCTGCGGAAG
CTGCTGCACCTGTCCTCTGCCAGCAACCACCCAGCCAGCTCCGATCCAAGGTTCCAGCCCCTG
ACAGCCCAGCAGACCAAGAACAGCTTCAGCGAGATCAGAATCCACCCTCTGTCCCAGGCCTCT
GGAGGCTCTAGCAACATCAGGCAGGAGCCAGCACCAAAGGGCCGGCCCGCCCTGCAGCTGCCT
GGCCAGATGGACCCAGGCTGGCACGTGTCCTCTGTGACAAGATCCGCCACCGAGGGCCCATCC
TACTCTGAGCAGCTGGGAGCAAAGAGCGGACCTAATGGACACCCATATCAGAGGACCAATAGA
TCCAGGATGCCCAATCTGAACGATCTGAAGGAGACAGCCCTG
DNA sequence for MBIP-TATκ28-CDKL5_107-FH [2NQ]
(human optimized)
SEQ ID NO: 140
ATGAAGCTGTCCCTGGTGGCCGCTATGCTGCTGCTGCTGTCTCTGGTCGCTGCCATGTTATTA
CTGCTGTCTGCCGCTAGGGCCGGGGACGCAGCACAGCCCGCAAGAAGAGCAAGAAGAACTAAA
CTGGCCGCTTACGCAAGGAAGGCAGCAAGACAGGCAAGAGCAGGCGGCGGCGGCTCCAAGATC
CCCAATATCGGCAACGTGATGAATAAGTTCGAGATCCTGGGAGTGGTGGGAGAGGGAGCCTAC
GGCGTGGTGCTGAAGTGCAGACACAAGGAGACACACGAGATCGTGGCCATCAAGAAGTTTAAG
GACAGCGAGGAGAATGAGGAGGTGAAGGAGACAACCCTGCGCGAGCTGAAGATGCTGCGGACA
CTGAAGCAGGAGAACATCGTGGAGCTGAAGGAGGCCTTCCGGAGAAGGGGCAAGCTGTACCTG
GTGTTTGAGTATGTGGAGAAGAACATGCTGGAGCTGCTGGAGGAGATGCCTAATGGCGTGCCC
CCTGAGAAGGTGAAGTCCTACATCTATCAGCTGATCAAGGCCATCCACTGGTGCCACAAGAAC
GATATCGTGCACCGCGACATCAAGCCCGAGAACCTGCTGATCTCCCACAATGACGTGCTGAAG
CTGTGCGACTTCGGCTTTGCCCGGAACCTGAGCGAGGGCAACAATGCCCATTACACAGAGTAT
GTGGCCACCCGCTGGTACAGAAGCCCCGAGCTGCTGCTGGGCGCCCCCTATGGCAAGAGCGTG
GATATGTGGTCCGTGGGCTGCATCCTGGGCGAGCTGTCTGATGGCCAGCCTCTGTTCCCAGGC
GAGAGCGAGATCGACCAGCTGTTTACCATCCAGAAGGTGCTGGGCCCTCTGCCAAGCGAGCAG
ATGAAGCTGTTCTACTCCAACCCAAGGTTCCACGGCCTGAGGTTTCCAGCCGTGAATCACCCT
CAGAGCCTGGAGCGCCGGTATCTGGGCATCCTGAACTCCGTGCTGCTGGACCTGATGAAGAAC
CTGCTGAAGCTGGACCCCGCCGACAGATACCTGACCGAGCAGTGTCTGAATCACCCTACATTT
CAGACCCAGAGACTGCTGGATAGGAGCCCTTCCCGCTCTGCCAAGCGGAAGCCATATCACGTG
GAGAGCAGCACCCTGTCCAATCGCAACCAGGCCGGCAAGTCTACAGCCCTGCAGAGCCACCAC
CGGAGCAACTCCAAGGATATCCAGAATCTGTCCGTGGGCCTGCCTAGGGCCGACGAGGGCCTG
CCAGCAAACGAGAGCTTCCTGAATGGAAACCTGGCAGGAGCCTCTCTGAGCCCACTGCACACA
AAGACCTACCAGGCCTCTAGCCAGCCCGGCTCCACATCTAAGGACCTGACCAACAATAACATC
CCACACCTGCTGTCTCCCAAGGAGGCCAAGAGCAAGACCGAGTTCGACTTCAACATCGACCCA
AAGCCTAGCGAGGGACCTGGCACAAAGTATCTGAAGAGCAACAGCCGGAGCCAGCAGAATAGG
CACTCCTTCATGGAGTCCTCTCAGTCTAAGGCCGGCACCCTGCAGCCAAACGAGAAGCAGAGC
AGGCACTCCTACATCGACACCATCCCACAGAGCAGCCGGAGCCCCTCCTATCGGACAAAGGCC
AAGTCTCACGGCGCCCTGTCTGATAGCAAGTCCGTGTCTAATCTGAGCGAGGCCAGAGCCCAG
ATCGCAGAGCCCAGCACCTCCAGGTACTTTCCTTCTAGCTGTCTGGATCTGAACTCTCCTACA
AGCCCAACACCCACCAGACACAGCGACACAAGGACCCTGCTGTCTCCAAGCGGCAGAAATAAC
AGGAACGAGGGCACCCTGGACAGCCGGCGGACCACAACCAGGCACAGCAAGACAATGGAGGAG
CTGAAGCTGCCAGAGCACATGGATTCCTCTCACTCCCACTCTCTGAGCGCCCCCCACGAGTCC
TTCTCTTACGGCCTGGGCTATACCTCCCCCTTCAGCAGCCAGCAGCGCCCCCACCGGCACTCT
ATGTACGTGACAAGAGATAAGGTGAGGGCAAAGGGCCTGGACGGCAGCCTGTCCATCGGACAG
GGAATGGCAGCCCGGGCCAACTCCCTGCAGCTGCTGTCTCCTCAGCCAGGAGAGCAGCTGCCA
CCAGAGATGACCGTGGCACGGAGCAGCGTGAAGGAGACAAGCAGGGAGGGCACCTCCTCTTTC
CACACAAGACAGAAGTCCGAGGGCGGCGTGTATCACGATCCCCACTCTGACGATGGCACAGCC
CCTAAGGAGAACAGGCACCTGTACAATGACCCCGTGCCTAGGAGGGTGGGCTCCTTCTATCGC
GTGCCATCTCCCCGGCCTGATAATAGCTTTCACGAGAATAACGTGAGCACCCGGGTGAGCAGC
CTGCCATCTGAGTCTAGCTCCGGCACAAACCACTCTAAGAGGCAGCCCGCCTTTGACCCTTGG
AAGAGCCCAGAGAATATCTCTCACAGCGAGCAGCTGAAGGAGAAGGAGAAGCAGGGCTTCTTT
CGCAGCATGAAGAAGAAGAAGAAGAAGAGCCAGACCGTGCCTAACTCCGATTCTCCAGACCTG
CTGACCCTGCAGAAGTCCATCCACAGCGCCTCCACACCCTCTAGCAGACCTAAGGAGTGGAGG
CCTGAGAAGATCAGCGACCTGCAGACCCAGAGCCAGCCACTGAAGTCCCTGCGGAAGCTGCTG
CACCTGTCCTCTGCCAGCAACCACCCAGCCAGCTCCGATCCAAGGTTCCAGCCCCTGACAGCC
CAGCAGACCAAGAACAGCTTCAGCGAGATCAGAATCCACCCTCTGTCCCAGGCCTCTGGAGGC
TCTAGCAACATCAGGCAGGAGCCAGCACCAAAGGGCCGGCCCGCCCTGCAGCTGCCTGGCCAG
ATGGACCCAGGCTGGCACGTGTCCTCTGTGACAAGATCCGCCACCGAGGGCCCATCCTACTCT
GAGCAGCTGGGAGCAAAGAGCGGACCTAATGGACACCCATATAACAGGACCAATAGATCCAGG

[chemical structure]

TTCCAGGGCGATTATAAGGACCACGATGGCGACTACAAGGACCACGACATTGACTACAAGGAC
GACGACGATAAAGACGGAGCACCCCATCACCACCACCATCATTGA
DNA sequence for CDKL5_107 [2NQ] (human optimized)
SEQ ID NO: 141
AAGATCCCCAATATCGGCAACGTGATGAATAAGTTCGAGATCCTGGGAGTGGTGGGAGAGGGA
GCCTACGGCGTGGTGCTGAAGTGCAGACACAAGGAGACACACGAGATCGTGGCCATCAAGAAG
TTTAAGGACAGCGAGGAGAATGAGGAGGTGAAGGAGACAACCCTGCGCGAGCTGAAGATGCTG
CGGACACTGAAGCAGGAGAACATCGTGGAGCTGAAGGAGGCCTTCCGGAGAAGGGGCAAGCTG
TACCTGGTGTTTGAGTATGTGGAGAAGAACATGCTGGAGCTGCTGGAGGAGATGCCTAATGGC
GTGCCCCCTGAGAAGGTGAAGTCCTACATCTATCAGCTGATCAAGGCCATCCACTGGTGCCAC
AAGAACGATATCGTGCACCGCGACATCAAGCCCGAGAACCTGCTGATCTCCCACAATGACGTG
CTGAAGCTGTGCGACTTCGGCTTTGCCCGGAACCTGAGCGAGGGCAACAATGCCCATTACACA
GAGTATGTGGCCACCCGCTGGTACAGAAGCCCCGAGCTGCTGCTGGGCGCCCCCTATGGCAAG
AGCGTGGATATGTGGTCCGTGGGCTGCATCCTGGGCGAGCTGTCTGATGGCCAGCCTCTGTTC
CCAGGCGAGAGCGAGATCGACCAGCTGTTTACCATCCAGAAGGTGCTGGGCCCTCTGCCAAGC
GAGCAGATGAAGCTGTTCTACTCCAACCCAAGGTTCCACGGCCTGAGGTTTCCAGCCGTGAAT
CACCCTCAGAGCCTGGAGCGCCGGTATCTGGGCATCCTGAACTCCGTGCTGCTGGACCTGATG
AAGAACCTGCTGAAGCTGGACCCCGCCGACAGATACCTGACCGAGCAGTGTCTGAATCACCCT
ACATTTCAGACCCAGAGACTGCTGGATAGGAGCCCTTCCCGCTCTGCCAAGCGGAAGCCATAT
CACGTGGAGAGCAGCACCCTGTCCAATCGCAACCAGGCCGGCAAGTCTACAGCCCTGCAGAGC
CACCACCGGAGCAACTCCAAGGATATCCAGAATCTGTCCGTGGGCCTGCCTAGGGCCGACGAG
GGCCTGCCAGCAAACGAGAGCTTCCTGAATGGAAACCTGGCAGGAGCCTCTCTGAGCCCACTG
CACACAAAGACCTACCAGGCCTCTAGCCAGCCCGGCTCCACATCTAAGGACCTGACCAACAAT
AACATCCCACACCTGCTGTCTCCCAAGGAGGCCAAGAGCAAGACCGAGTTCGACTTCAACATC
GACCCAAAGCCTAGCGAGGGACCTGGCACAAAGTATCTGAAGAGCAACAGCCGGAGCCAGCAG
AATAGGCACTCCTTCATGGAGTCCTCTCAGTCTAAGGCCGGCACCCTGCAGCCAAACGAGAAG
CAGAGCAGGCACTCCTACATCGACACCATCCCACAGAGCAGCCGGAGCCCCTCCTATCGGACA
AAGGCCAAGTCTCACGGCGCCCTGTCTGATAGCAAGTCCGTGTCTAATCTGAGCGAGGCCAGA
GCCCAGATCGCAGAGCCCAGCACCTCCAGGTACTTTCCTTCTAGCTGTCTGGATCTGAACTCT
CCTACAAGCCCAACACCCACCAGACACAGCGACACAAGGACCCTGCTGTCTCCAAGCGGCAGA
AATAACAGGAACGAGGGCACCCTGGACAGCCGGCGGACCACAACCAGGCACAGCAAGACAATG
GAGGAGCTGAAGCTGCCAGAGCACATGGATTCCTCTCACTCCCACTCTCTGAGCGCCCCCCAC
GAGTCCTTCTCTTACGGCCTGGGCTATACCTCCCCCTTCAGCAGCCAGCAGCGCCCCCACCGG
CACTCTATGTACGTGACAAGAGATAAGGTGAGGGCAAAGGGCCTGGACGGCAGCCTGTCCATC
GGACAGGGAATGGCAGCCCGGGCCAACTCCCTGCAGCTGCTGTCTCCTCAGCCAGGAGAGCAG
CTGCCACCAGAGATGACCGTGGCACGGAGCAGCGTGAAGGAGACAAGCAGGGAGGGCACCTCC
TCTTTCCACACAAGACAGAAGTCCGAGGGCGGCGTGTATCACGATCCCCACTCTGACGATGGC
ACAGCCCCTAAGGAGAACAGGCACCTGTACAATGACCCCGTGCCTAGGAGGGTGGGCTCCTTC
TATCGCGTGCCATCTCCCCGGCCTGATAATAGCTTTCACGAGAATAACGTGAGCACCCGGGTG
AGCAGCCTGCCATCTGAGTCTAGCTCCGGCACAAACCACTCTAAGAGGCAGCCCGCCTTTGAC
CCTTGGAAGAGCCCAGAGAATATCTCTCACAGCGAGCAGCTGAAGGAGAAGGAGAAGCAGGGC
TTCTTTCGCAGCATGAAGAAGAAGAAGAAGAAGAGCCAGACCGTGCCTAACTCCGATTCTCCA
GACCTGCTGACCCTGCAGAAGTCCATCCACAGCGCCTCCACACCCTCTAGCAGACCTAAGGAG
TGGAGGCCTGAGAAGATCAGCGACCTGCAGACCCAGAGCCAGCCACTGAAGTCCCTGCGGAAG
CTGCTGCACCTGTCCTCTGCCAGCAACCACCCAGCCAGCTCCGATCCAAGGTTCCAGCCCCTG
ACAGCCCAGCAGACCAAGAACAGCTTCAGCGAGATCAGAATCCACCCTCTGTCCCAGGCCTCT
GGAGGCTCTAGCAACATCAGGCAGGAGCCAGCACCAAAGGGCCGGCCCGCCCTGCAGCTGCCT
GGCCAGATGGACCCAGGCTGGCACGTGTCCTCTGTGACAAGATCCGCCACCGAGGGCCCATCC
TACTCTGAGCAGCTGGGAGCAAAGAGCGGACCTAATGGACACCCATATAACAGGACCAATAGA
TCCAGGATGCCCAATCTGAACGATCTGAAGGAGACAGCCCTG
DNA sequence for MBIP-TATκ28-CDKL5_107-FH [1-10NQ] (human optimized)
SEQ ID NO: 142
ATGAAGCTGTCCCTGGTGGCCGCTATGCTGCTGCTGCTGTCTCTGGTCGCTGCCATGTTATTA
CTGCTGTCTGCCGCTAGGGCCGGGGACGCAGCACAGCCCGCAAGAAGAGCAAGAAGAACTAAA
CTGGCCGCTTACGCAAGGAAGGCAGCAAGACAGGCAAGAGCAGGCGGCGGCGGCTCCAAGATC
CCCAATATCGGCAACGTGATGAATAAGTTCGAGATCCTGGGAGTGGTGGGAGAGGGAGCCTAC
GGCGTGGTGCTGAAGTGCAGACACAAGGAGACACACGAGATCGTGGCCATCAAGAAGTTTAAG
GACAGCGAGGAGAATGAGGAGGTGAAGGAGACAACCCTGCGCGAGCTGAAGATGCTGCGGACA
CTGAAGCAGGAGAACATCGTGGAGCTGAAGGAGGCCTTCCGGAGAAGGGGCAAGCTGTACCTG
GTGTTTGAGTATGTGGAGAAGAACATGCTGGAGCTGCTGGAGGAGATGCCTAATGGCGTGCCC
CCTGAGAAGGTGAAGTCCTACATCTATCAGCTGATCAAGGCCATCCACTGGTGCCACAAGAAC
GATATCGTGCACCGCGACATCAAGCCCGAGAACCTGCTGATCTCCCACAATGACGTGCTGAAG
CTGTGCGACTTCGGCTTTGCCCGGCAGCTGAGCGAGGGCAACAATGCCCAGTACACAGAGTAT
GTGGCCACCCGCTGGTACAGAAGCCCCGAGCTGCTGCTGGGCGCCCCCTATGGCAAGAGCGTG
GATATGTGGTCCGTGGGCTGCATCCTGGGCGAGCTGTCTGATGGCCAGCCTCTGTTCCCAGGC
GAGAGCGAGATCGACCAGCTGTTTACCATCCAGAAGGTGCTGGGCCCTCTGCCAAGCGAGCAG
ATGAAGCTGTTCTACTCCAACCCAAGGTTCCACGGCCTGAGGTTTCCAGCCGTGAATCACCCT
CAGAGCCTGGAGCGCCGGTATCTGGGCATCCTGAACTCCGTGCTGCTGGACCTGATGAAGAAC
CTGCTGAAGCTGGACCCCGCCGACAGATACCTGACCGAGCAGTGTCTGAATCACCCTACATTT
CAGACCCAGAGACTGCTGGATAGGAGCCCTTCCCGCTCTGCCAAGCGGAAGCCATATCACGTG
GAGAGCAGCACCCTGTCCAATCGCAACCAGGCCGGCAAGTCTACAGCCCTGCAGAGCCACCAC
CGGAGCAACTCCAAGGATATCCAGCAGCTGTCCGTGGGCCTGCCTAGGGCCGACGAGGGCCTG
CCAGCA [symbol] GAGAGCTTCCTGAATGGAAACCTGGCAGGAGCCTCTCTGAGCCCACTGCACACA
AAGACCTACCAGGCCTCTAGCCAGCCCGGCTCCACATCTAAGGACCTGACCAACAATAACATC
CCACACCTGCTGTCTCCCAAGGAGGCCAAGAGCAAGACCGAGTTCGACTTCAACATCGACCCA
AAGCCTAGCGAGGGACCTGGCACAAAGTATCTGAAGAGCAACAGCCGGAGCCAGCAGAATAGG
CACTCCTTCATGGAGTCCTCTCAGTCTAAGGCCGGCACCCTGCAGCCAAACGAGAAGCAGAGC
AGGCACTCCTACATCGACACCATCCCACAGAGCAGCCGGAGCCCCTCCTATCGGACAAAGGCC
AAGTCTCACGGCGCCCTGTCTGATAGCAAGTCCGTGTCTCAGCTGAGCGAGGCCAGAGCCCAG
ATCGCAGAGCCCAGCACCTCCAGGTACTTTCCTTCTAGCTGTCTGGATCTGAACTCTCCTACA
AGCCCAACACCCACCAGACACAGCGACACAAGGACCCTGCTGTCTCCAAGCGGCAGAAATAAC
AGGAACGAGGGCACCCTGGACAGCCGGCGGACCACAACCAGGCACAGCAAGACAATGGAGGAG
CTGAAGCTGCCAGAGCACATGGATTCCTCTCACTCCCACTCTCTGAGCGCCCCCCACGAGTCC
TTCTCTTACGGCCTGGGCTATACCTCCCCCTTCAGCAGCCAGCAGCGCCCCCACCGGCACTCT
ATGTACGTGACAAGAGATAAGGTGAGGGCAAAGGGCCTGGACGGCAGCCTGTCCATCGGACAG
GGAATGGCAGCCCGGGCCAACTCCCTGCAGCTGCTGTCTCCTCAGCCAGGAGAGCAGCTGCCA
CCAGAGATGACCGTGGCACGGAGCAGCGTGAAGGAGACAAGCAGGGAGGGCACCTCCTCTTTC
CACACAAGACAGAAGTCCGAGGGCGGCGTGTATCACGATCCCCACTCTGACGATGGCACAGCC
CCTAAGGAGAACAGGCACCTGTACAATGACCCCGTGCCTAGGAGGGTGGGCTCCTTCTATCGC
GTGCCATCTCCCCGGCCTGATAATAGCTTTCACGAGAAT [symbol] GTGAGCACCCGGGTGAGCAGC
CTGCCATCTGAGTCTAGCTCCGGCACA [symbol] CACTCTAAGAGGCAGCCCGCCTTTGACCCTTGG
AAGAGCCCAGAGCAGATCTCTCACAGCGAGCAGCTGAAGGAGAAGGAGAAGCAGGGCTTCTTT
CGCAGCATGAAGAAGAAGAAGAAGAAGAGCCAGACCGTGCCTAACTCCGATTCTCCAGACCTG
CTGACCCTGCAGAAGTCCATCCACAGCGCCTCCACACCCTCTAGCAGACCTAAGGAGTGGAGG
CCTGAGAAGATCAGCGACCTGCAGACCCAGAGCCAGCCACTGAAGTCCCTGCGGAAGCTGCTG
CACCTGTCCTCTGCCAGCAACCACCCAGCCAGCTCCGATCCAAGGTTCCAGCCCCTGACAGCC
CAGCAGACCAAGAACAGCTTCAGCGAGATCAGAATCCACCCTCTGTCCCAGGCCTCTGGAGGC
TCTAGCAACATCAGGCAGGAGCCAGCACCAAAGGGCCGGCCCGCCCTGCAGCTGCCTGGCCAG
ATGGACCCAGGCTGGCACGTGTCCTCTGTGACAAGATCCGCCACCGAGGGCCCATCCTACTCT
GAGCAGCTGGGAGCAAAGAGCGGACCTAATGGACACCCATATCAGAGGACCCAGAGATCCAGG

[chemical structure]

TTCCAGGGCGATTATAAGGACCACGATGGCGACTACAAGGACCACGACATTGACTACAAGGAC
GACGACGATAAAGACGGAGCACCCCATCACCACCACCATCATTGA
DNA sequence for CDKL5_107[1-10NQ] (human optimized)
SEQ ID NO: 143
AAGATCCCCAATATCGGCAACGTGATGAATAAGTTCGAGATCCTGGGAGTGGTGGGAGAGGGA
GCCTACGGCGTGGTGCTGAAGTGCAGACACAAGGAGACACACGAGATCGTGGCCATCAAGAAG
TTTAAGGACAGCGAGGAGAATGAGGAGGTGAAGGAGACAACCCTGCGCGAGCTGAAGATGCTG
CGGACACTGAAGCAGGAGAACATCGTGGAGCTGAAGGAGGCCTTCCGGAGAAGGGGCAAGCTG
TACCTGGTGTTTGAGTATGTGGAGAAGAACATGCTGGAGCTGCTGGAGGAGATGCCTAATGGC
GTGCCCCCTGAGAAGGTGAAGTCCTACATCTATCAGCTGATCAAGGCCATCCACTGGTGCCAC
AAGAACGATATCGTGCACCGCGACATCAAGCCCGAGAACCTGCTGATCTCCCACAATGACGTG
CTGAAGCTGTGCGACTTCGGCTTTGCCCGGCAGCTGAGCGAGGGCAACAATGCCCAGTACACA
GAGTATGTGGCCACCCGCTGGTACAGAAGCCCCGAGCTGCTGCTGGGCGCCCCCTATGGCAAG
AGCGTGGATATGTGGTCCGTGGGCTGCATCCTGGGCGAGCTGTCTGATGGCCAGCCTCTGTTC
CCAGGCGAGAGCGAGATCGACCAGCTGTTTACCATCCAGAAGGTGCTGGGCCCTCTGCCAAGC
GAGCAGATGAAGCTGTTCTACTCCAACCCAAGGTTCCACGGCCTGAGGTTTCCAGCCGTGAAT
CACCCTCAGAGCCTGGAGCGCCGGTATCTGGGCATCCTGAACTCCGTGCTGCTGGACCTGATG
AAGAACCTGCTGAAGCTGGACCCCGCCGACAGATACCTGACCGAGCAGTGTCTGAATCACCCT
ACATTTCAGACCCAGAGACTGCTGGATAGGAGCCCTTCCCGCTCTGCCAAGCGGAAGCCATAT
CACGTGGAGAGCAGCACCCTGTCCAATCGCAACCAGGCCGGCAAGTCTACAGCCCTGCAGAGC
CACCACCGGAGCAACTCCAAGGATATCCAGCAGCTGTCCGTGGGCCTGCCTAGGGCCGACGAG
GGCCTGCCAGCA [symbol] GAGAGCTTCCTGAATGGAAACCTGGCAGGAGCCTCTCTGAGCCCACTG
CACACAAAGACCTACCAGGCCTCTAGCCAGCCCGGCTCCACATCTAAGGACCTGACCAACAAT
AACATCCCACACCTGCTGTCTCCCAAGGAGGCCAAGAGCAAGACCGAGTTCGACTTCAACATC
GACCCAAAGCCTAGCGAGGGACCTGGCACAAAGTATCTGAAGAGCAACAGCCGGAGCCAGCAG
AATAGGCACTCCTTCATGGAGTCCTCTCAGTCTAAGGCCGGCACCCTGCAGCCAAACGAGAAG
CAGAGCAGGCACTCCTACATCGACACCATCCCACAGAGCAGCCGGAGCCCCTCCTATCGGACA
AAGGCCAAGTCTCACGGCGCCCTGTCTGATAGCAAGTCCGTGTCTCAGCTGAGCGAGGCCAGA
GCCCAGATCGCAGAGCCCAGCACCTCCAGGTACTTTCCTTCTAGCTGTCTGGATCTGAACTCT
CCTACAAGCCCAACACCCACCAGACACAGCGACACAAGGACCCTGCTGTCTCCAAGCGGCAGA
AATAACAGGAACGAGGGCACCCTGGACAGCCGGCGGACCACAACCAGGCACAGCAAGACAATG
GAGGAGCTGAAGCTGCCAGAGCACATGGATTCCTCTCACTCCCACTCTCTGAGCGCCCCCCAC
GAGTCCTTCTCTTACGGCCTGGGCTATACCTCCCCCTTCAGCAGCCAGCAGCGCCCCCACCGG
CACTCTATGTACGTGACAAGAGATAAGGTGAGGGCAAAGGGCCTGGACGGCAGCCTGTCCATC
GGACAGGGAATGGCAGCCCGGGCCAACTCCCTGCAGCTGCTGTCTCCTCAGCCAGGAGAGCAG
CTGCCACCAGAGATGACCGTGGCACGGAGCAGCGTGAAGGAGACAAGCAGGGAGGGCACCTCC
TCTTTCCACACAAGACAGAAGTCCGAGGGCGGCGTGTATCACGATCCCCACTCTGACGATGGC
ACAGCCCCTAAGGAGAACAGGCACCTGTACAATGACCCCGTGCCTAGGAGGGTGGGCTCCTTC
TATCGCGTGCCATCTCCCCGGCCTGATAATAGCTTTCACGAGAAT [symbol] GTGAGCACCCGGGTG
AGCAGCCTGCCATCTGAGTCTAGCTCCGGCACA [symbol] CACTCTAAGAGGCAGCCCGCCTTTGAC
CCTTGGAAGAGCCCAGAGCAGATCTCTCACAGCGAGCAGCTGAAGGAGAAGGAGAAGCAGGGC
TTCTTTCGCAGCATGAAGAAGAAGAAGAAGAAGAGCCAGACCGTGCCTAACTCCGATTCTCCA
GACCTGCTGACCCTGCAGAAGTCCATCCACAGCGCCTCCACACCCTCTAGCAGACCTAAGGAG
TGGAGGCCTGAGAAGATCAGCGACCTGCAGACCCAGAGCCAGCCACTGAAGTCCCTGCGGAAG
CTGCTGCACCTGTCCTCTGCCAGCAACCACCCAGCCAGCTCCGATCCAAGGTTCCAGCCCCTG
ACAGCCCAGCAGACCAAGAACAGCTTCAGCGAGATCAGAATCCACCCTCTGTCCCAGGCCTCT
GGAGGCTCTAGCAACATCAGGCAGGAGCCAGCACCAAAGGGCCGGCCCGCCCTGCAGCTGCCT
GGCCAGATGGACCCAGGCTGGCACGTGTCCTCTGTGACAAGATCCGCCACCGAGGGCCCATCC
TACTCTGAGCAGCTGGGAGCAAAGAGCGGACCTAATGGACACCCATATCAGAGGACCCAGAGA
TCCAGGATGCCCAATCTGAACGATCTGAAGGAGACAGCCCTG
DNA sequence for MBIP-TATκ28-CDKL5_107-FH [1-7,9-10NQ]
(human optimized)
SEQ ID NO: 144
ATGAAGCTGTCCCTGGTGGCCGCTATGCTGCTGCTGCTGTCTCTGGTCGCTGCCATGTTATTA
CTGCTGTCTGCCGCTAGGGCCGGGGACGCAGCACAGCCCGCAAGAAGAGCAAGAAGAACTAAA
CTGGCCGCTTACGCAAGGAAGGCAGCAAGACAGGCAAGAGCAGGCGGCGGCGGCTCCAAGATC
CCCAATATCGGCAACGTGATGAATAAGTTCGAGATCCTGGGAGTGGTGGGAGAGGGAGCCTAC
GGCGTGGTGCTGAAGTGCAGACACAAGGAGACACACGAGATCGTGGCCATCAAGAAGTTTAAG
GACAGCGAGGAGAATGAGGAGGTGAAGGAGACAACCCTGCGCGAGCTGAAGATGCTGCGGACA
CTGAAGCAGGAGAACATCGTGGAGCTGAAGGAGGCCTTCCGGAGAAGGGGCAAGCTGTACCTG
GTGTTTGAGTATGTGGAGAAGAACATGCTGGAGCTGCTGGAGGAGATGCCTAATGGCGTGCCC
CCTGAGAAGGTGAAGTCCTACATCTATCAGCTGATCAAGGCCATCCACTGGTGCCACAAGAAC
GATATCGTGCACCGCGACATCAAGCCCGAGAACCTGCTGATCTCCCACAATGACGTGCTGAAG
CTGTGCGACTTCGGCTTTGCCCGGCAGCTGAGCGAGGGCAACAATGCCCAGTACACAGAGTAT
GTGGCCACCCGCTGGTACAGAAGCCCCGAGCTGCTGCTGGGCGCCCCCTATGGCAAGAGCGTG
GATATGTGGTCCGTGGGCTGCATCCTGGGCGAGCTGTCTGATGGCCAGCCTCTGTTCCCAGGC
GAGAGCGAGATCGACCAGCTGTTTACCATCCAGAAGGTGCTGGGCCCTCTGCCAAGCGAGCAG
ATGAAGCTGTTCTACTCCAACCCAAGGTTCCACGGCCTGAGGTTTCCAGCCGTGAATCACCCT
CAGAGCCTGGAGCGCCGGTATCTGGGCATCCTGAACTCCGTGCTGCTGGACCTGATGAAGAAC
CTGCTGAAGCTGGACCCCGCCGACAGATACCTGACCGAGCAGTGTCTGAATCACCCTACATTT
CAGACCCAGAGACTGCTGGATAGGAGCCCTTCCCGCTCTGCCAAGCGGAAGCCATATCACGTG
GAGAGCAGCACCCTGTCCAATCGCAACCAGGCCGGCAAGTCTACAGCCCTGCAGAGCCACCAC
CGGAGCAACTCCAAGGATATCCAGCAGCTGTCCGTGGGCCTGCCTAGGGCCGACGAGGGCCTG
CCAGCA [symbol] GAGAGCTTCCTGAATGGAAACCTGGCAGGAGCCTCTCTGAGCCCACTGCACACA
AAGACCTACCAGGCCTCTAGCCAGCCCGGCTCCACATCTAAGGACCTGACCAACAATAACATC
CCACACCTGCTGTCTCCCAAGGAGGCCAAGAGCAAGACCGAGTTCGACTTCAACATCGACCCA
AAGCCTAGCGAGGGACCTGGCACAAAGTATCTGAAGAGCAACAGCCGGAGCCAGCAGAATAGG
CACTCCTTCATGGAGTCCTCTCAGTCTAAGGCCGGCACCCTGCAGCCAAACGAGAAGCAGAGC
AGGCACTCCTACATCGACACCATCCCACAGAGCAGCCGGAGCCCCTCCTATCGGACAAAGGCC
AAGTCTCACGGCGCCCTGTCTGATAGCAAGTCCGTGTCTCAGCTGAGCGAGGCCAGAGCCCAG
ATCGCAGAGCCCAGCACCTCCAGGTACTTTCCTTCTAGCTGTCTGGATCTGAACTCTCCTACA
AGCCCAACACCCACCAGACACAGCGACACAAGGACCCTGCTGTCTCCAAGCGGCAGAAATAAC
AGGAACGAGGGCACCCTGGACAGCCGGCGGACCACAACCAGGCACAGCAAGACAATGGAGGAG
CTGAAGCTGCCAGAGCACATGGATTCCTCTCACTCCCACTCTCTGAGCGCCCCCCACGAGTCC
TTCTCTTACGGCCTGGGCTATACCTCCCCCTTCAGCAGCCAGCAGCGCCCCCACCGGCACTCT
ATGTACGTGACAAGAGATAAGGTGAGGGCAAAGGGCCTGGACGGCAGCCTGTCCATCGGACAG
GGAATGGCAGCCCGGGCCAACTCCCTGCAGCTGCTGTCTCCTCAGCCAGGAGAGCAGCTGCCA
CCAGAGATGACCGTGGCACGGAGCAGCGTGAAGGAGACAAGCAGGGAGGGCACCTCCTCTTTC
CACACAAGACAGAAGTCCGAGGGCGGCGTGTATCACGATCCCCACTCTGACGATGGCACAGCC
CCTAAGGAGAACAGGCACCTGTACAATGACCCCGTGCCTAGGAGGGTGGGCTCCTTCTATCGC
GTGCCATCTCCCCGGCCTGATAATAGCTTTCACGAGAAT [symbol] GTGAGCACCCGGGTGAGCAGC
CTGCCATCTGAGTCTAGCTCCGGCACA [symbol] CACTCTAAGAGGCAGCCCGCCTTTGACCCTTGG
AAGAGCCCAGAGCAGATCTCTCACAGCGAGCAGCTGAAGGAGAAGGAGAAGCAGGGCTTCTTT
CGCAGCATGAAGAAGAAGAAGAAGAAGAGCCAGACCGTGCCTAACTCCGATTCTCCAGACCTG
CTGACCCTGCAGAAGTCCATCCACAGCGCCTCCACACCCTCTAGCAGACCTAAGGAGTGGAGG
CCTGAGAAGATCAGCGACCTGCAGACCCAGAGCCAGCCACTGAAGTCCCTGCGGAAGCTGCTG
CACCTGTCCTCTGCCAGCAACCACCCAGCCAGCTCCGATCCAAGGTTCCAGCCCCTGACAGCC
CAGCAGACCAAGAACAGCTTCAGCGAGATCAGAATCCACCCTCTGTCCCAGGCCTCTGGAGGC
TCTAGCAACATCAGGCAGGAGCCAGCACCAAAGGGCCGGCCCGCCCTGCAGCTGCCTGGCCAG
ATGGACCCAGGCTGGCACGTGTCCTCTGTGACAAGATCCGCCACCGAGGGCCCATCCTACTCT
GAGCAGCTGGGAGCAAAGAGCGGACCTAATGGACACCCATATCAGAGGACCCAGAGATCCAGG

[chemical structure]

TTCCAGGGCGATTATAAGGACCACGATGGCGACTACAAGGACCACGACATTGACTACAAGGAC
GACGACGATAAAGACGGAGCACCCCATCACCACCACCATCATTGA
DNA sequence for CDKL5_107 [1-7,9-10NQ] (human optimized)
SEQ ID NO: 145
AAGATCCCCAATATCGGCAACGTGATGAATAAGTTCGAGATCCTGGGAGTGGTGGGAGAGGGA
GCCTACGGCGTGGTGCTGAAGTGCAGACACAAGGAGACACACGAGATCGTGGCCATCAAGAAG
TTTAAGGACAGCGAGGAGAATGAGGAGGTGAAGGAGACAACCCTGCGCGAGCTGAAGATGCTG
CGGACACTGAAGCAGGAGAACATCGTGGAGCTGAAGGAGGCCTTCCGGAGAAGGGGCAAGCTG
TACCTGGTGTTTGAGTATGTGGAGAAGAACATGCTGGAGCTGCTGGAGGAGATGCCTAATGGC
GTGCCCCCTGAGAAGGTGAAGTCCTACATCTATCAGCTGATCAAGGCCATCCACTGGTGCCAC
AAGAACGATATCGTGCACCGCGACATCAAGCCCGAGAACCTGCTGATCTCCCACAATGACGTG
CTGAAGCTGTGCGACTTCGGCTTTGCCCGGCAGCTGAGCGAGGGCAACAATGCCCAGTACACA
GAGTATGTGGCCACCCGCTGGTACAGAAGCCCCGAGCTGCTGCTGGGCGCCCCCTATGGCAAG
AGCGTGGATATGTGGTCCGTGGGCTGCATCCTGGGCGAGCTGTCTGATGGCCAGCCTCTGTTC
CCAGGCGAGAGCGAGATCGACCAGCTGTTTACCATCCAGAAGGTGCTGGGCCCTCTGCCAAGC
GAGCAGATGAAGCTGTTCTACTCCAACCCAAGGTTCCACGGCCTGAGGTTTCCAGCCGTGAAT
CACCCTCAGAGCCTGGAGCGCCGGTATCTGGGCATCCTGAACTCCGTGCTGCTGGACCTGATG
AAGAACCTGCTGAAGCTGGACCCCGCCGACAGATACCTGACCGAGCAGTGTCTGAATCACCCT
ACATTTCAGACCCAGAGACTGCTGGATAGGAGCCCTTCCCGCTCTGCCAAGCGGAAGCCATAT
CACGTGGAGAGCAGCACCCTGTCCAATCGCAACCAGGCCGGCAAGTCTACAGCCCTGCAGAGC
CACCACCGGAGCAACTCCAAGGATATCCAGCAGCTGTCCGTGGGCCTGCCTAGGGCCGACGAG
GGCCTGCCAGCA [symbol] GAGAGCTTCCTGAATGGAAACCTGGCAGGAGCCTCTCTGAGCCCACTG
CACACAAAGACCTACCAGGCCTCTAGCCAGCCCGGCTCCACATCTAAGGACCTGACCAACAAT
AACATCCCACACCTGCTGTCTCCCAAGGAGGCCAAGAGCAAGACCGAGTTCGACTTCAACATC
GACCCAAAGCCTAGCGAGGGACCTGGCACAAAGTATCTGAAGAGCAACAGCCGGAGCCAGCAG
AATAGGCACTCCTTCATGGAGTCCTCTCAGTCTAAGGCCGGCACCCTGCAGCCAAACGAGAAG
CAGAGCAGGCACTCCTACATCGACACCATCCCACAGAGCAGCCGGAGCCCCTCCTATCGGACA
AAGGCCAAGTCTCACGGCGCCCTGTCTGATAGCAAGTCCGTGTCTCAGCTGAGCGAGGCCAGA
GCCCAGATCGCAGAGCCCAGCACCTCCAGGTACTTTCCTTCTAGCTGTCTGGATCTGAACTCT
CCTACAAGCCCAACACCCACCAGACACAGCGACACAAGGACCCTGCTGTCTCCAAGCGGCAGA
AATAACAGGAACGAGGGCACCCTGGACAGCCGGCGGACCACAACCAGGCACAGCAAGACAATG
GAGGAGCTGAAGCTGCCAGAGCACATGGATTCCTCTCACTCCCACTCTCTGAGCGCCCCCCAC
GAGTCCTTCTCTTACGGCCTGGGCTATACCTCCCCCTTCAGCAGCCAGCAGCGCCCCCACCGG
CACTCTATGTACGTGACAAGAGATAAGGTGAGGGCAAAGGGCCTGGACGGCAGCCTGTCCATC
GGACAGGGAATGGCAGCCCGGGCCAACTCCCTGCAGCTGCTGTCTCCTCAGCCAGGAGAGCAG
CTGCCACCAGAGATGACCGTGGCACGGAGCAGCGTGAAGGAGACAAGCAGGGAGGGCACCTCC
TCTTTCCACACAAGACAGAAGTCCGAGGGCGGCGTGTATCACGATCCCCACTCTGACGATGGC
ACAGCCCCTAAGGAGAACAGGCACCTGTACAATGACCCCGTGCCTAGGAGGGTGGGCTCCTTC
TATCGCGTGCCATCTCCCCGGCCTGATAATAGCTTTCACGAGAAT [symbol] GTGAGCACCCGGGTG
AGCAGCCTGCCATCTGAGTCTAGCTCCGGCACA [symbol] CACTCTAAGAGGCAGCCCGCCTTTGAC
CCTTGGAAGAGCCCAGAGCAGATCTCTCACAGCGAGCAGCTGAAGGAGAAGGAGAAGCAGGGC
TTCTTTCGCAGCATGAAGAAGAAGAAGAAGAAGAGCCAGACCGTGCCTAACTCCGATTCTCCA
GACCTGCTGACCCTGCAGAAGTCCATCCACAGCGCCTCCACACCCTCTAGCAGACCTAAGGAG
TGGAGGCCTGAGAAGATCAGCGACCTGCAGACCCAGAGCCAGCCACTGAAGTCCCTGCGGAAG
CTGCTGCACCTGTCCTCTGCCAGCAACCACCCAGCCAGCTCCGATCCAAGGTTCCAGCCCCTG
ACAGCCCAGCAGACCAAGAACAGCTTCAGCGAGATCAGAATCCACCCTCTGTCCCAGGCCTCT
GGAGGCTCTAGCAACATCAGGCAGGAGCCAGCACCAAAGGGCCGGCCCGCCCTGCAGCTGCCT
GGCCAGATGGACCCAGGCTGGCACGTGTCCTCTGTGACAAGATCCGCCACCGAGGGCCCATCC
TACTCTGAGCAGCTGGGAGCAAAGAGCGGACCTAATGGACACCCATATCAGAGGACCCAGAGA
TCCAGGATGCCCAATCTGAACGATCTGAAGGAGACAGCCCTG
DNA sequence for MBIP-TATκ28-CDKL5_107-FH [1-8, 10NQ]
(human optimized)
SEQ ID NO: 146
ATGAAGCTGTCCCTGGTGGCCGCTATGCTGCTGCTGCTGTCTCTGGTCGCTGCCATGTTATTA
CTGCTGTCTGCCGCTAGGGCCGGGGACGCAGCACAGCCCGCAAGAAGAGCAAGAAGAACTAAA
CTGGCCGCTTACGCAAGGAAGGCAGCAAGACAGGCAAGAGCAGGCGGCGGCGGCTCCAAGATC
CCCAATATCGGCAACGTGATGAATAAGTTCGAGATCCTGGGAGTGGTGGGAGAGGGAGCCTAC
GGCGTGGTGCTGAAGTGCAGACACAAGGAGACACACGAGATCGTGGCCATCAAGAAGTTTAAG
GACAGCGAGGAGAATGAGGAGGTGAAGGAGACAACCCTGCGCGAGCTGAAGATGCTGCGGACA
CTGAAGCAGGAGAACATCGTGGAGCTGAAGGAGGCCTTCCGGAGAAGGGGCAAGCTGTACCTG
GTGTTTGAGTATGTGGAGAAGAACATGCTGGAGCTGCTGGAGGAGATGCCTAATGGCGTGCCC
CCTGAGAAGGTGAAGTCCTACATCTATCAGCTGATCAAGGCCATCCACTGGTGCCACAAGAAC
GATATCGTGCACCGCGACATCAAGCCCGAGAACCTGCTGATCTCCCACAATGACGTGCTGAAG
CTGTGCGACTTCGGCTTTGCCCGGCAGCTGAGCGAGGGCAACAATGCCCAGTACACAGAGTAT
GTGGCCACCCGCTGGTACAGAAGCCCCGAGCTGCTGCTGGGCGCCCCCTATGGCAAGAGCGTG
GATATGTGGTCCGTGGGCTGCATCCTGGGCGAGCTGTCTGATGGCCAGCCTCTGTTCCCAGGC
GAGAGCGAGATCGACCAGCTGTTTACCATCCAGAAGGTGCTGGGCCCTCTGCCAAGCGAGCAG
ATGAAGCTGTTCTACTCCAACCCAAGGTTCCACGGCCTGAGGTTTCCAGCCGTGAATCACCCT
CAGAGCCTGGAGCGCCGGTATCTGGGCATCCTGAACTCCGTGCTGCTGGACCTGATGAAGAAC
CTGCTGAAGCTGGACCCCGCCGACAGATACCTGACCGAGCAGTGTCTGAATCACCCTACATTT
CAGACCCAGAGACTGCTGGATAGGAGCCCTTCCCGCTCTGCCAAGCGGAAGCCATATCACGTG
GAGAGCAGCACCCTGTCCAATCGCAACCAGGCCGGCAAGTCTACAGCCCTGCAGAGCCACCAC
CGGAGCAACTCCAAGGATATCCAGCAGCTGTCCGTGGGCCTGCCTAGGGCCGACGAGGGCCTG
CCAGCA [symbol] GAGAGCTTCCTGAATGGAAACCTGGCAGGAGCCTCTCTGAGCCCACTGCACACA
AAGACCTACCAGGCCTCTAGCCAGCCCGGCTCCACATCTAAGGACCTGACCAACAATAACATC
CCACACCTGCTGTCTCCCAAGGAGGCCAAGAGCAAGACCGAGTTCGACTTCAACATCGACCCA
AAGCCTAGCGAGGGACCTGGCACAAAGTATCTGAAGAGCAACAGCCGGAGCCAGCAGAATAGG
CACTCCTTCATGGAGTCCTCTCAGTCTAAGGCCGGCACCCTGCAGCCAAACGAGAAGCAGAGC
AGGCACTCCTACATCGACACCATCCCACAGAGCAGCCGGAGCCCCTCCTATCGGACAAAGGCC
AAGTCTCACGGCGCCCTGTCTGATAGCAAGTCCGTGTCTCAGCTGAGCGAGGCCAGAGCCCAG
ATCGCAGAGCCCAGCACCTCCAGGTACTTTCCTTCTAGCTGTCTGGATCTGAACTCTCCTACA
AGCCCAACACCCACCAGACACAGCGACACAAGGACCCTGCTGTCTCCAAGCGGCAGAAATAAC
AGGAACGAGGGCACCCTGGACAGCCGGCGGACCACAACCAGGCACAGCAAGACAATGGAGGAG
CTGAAGCTGCCAGAGCACATGGATTCCTCTCACTCCCACTCTCTGAGCGCCCCCCACGAGTCC
TTCTCTTACGGCCTGGGCTATACCTCCCCCTTCAGCAGCCAGCAGCGCCCCCACCGGCACTCT
ATGTACGTGACAAGAGATAAGGTGAGGGCAAAGGGCCTGGACGGCAGCCTGTCCATCGGACAG
GGAATGGCAGCCCGGGCCAACTCCCTGCAGCTGCTGTCTCCTCAGCCAGGAGAGCAGCTGCCA
CCAGAGATGACCGTGGCACGGAGCAGCGTGAAGGAGACAAGCAGGGAGGGCACCTCCTCTTTC
CACACAAGACAGAAGTCCGAGGGCGGCGTGTATCACGATCCCCACTCTGACGATGGCACAGCC
CCTAAGGAGAACAGGCACCTGTACAATGACCCCGTGCCTAGGAGGGTGGGCTCCTTCTATCGC
GTGCCATCTCCCCGGCCTGATAATAGCTTTCACGAGAAT [symbol] GTGAGCACCCGGGTGAGCAGC
CTGCCATCTGAGTCTAGCTCCGGCACA [symbol] CACTCTAAGAGGCAGCCCGCCTTTGACCCTTGG
AAGAGCCCAGAGCAGATCTCTCACAGCGAGCAGCTGAAGGAGAAGGAGAAGCAGGGCTTCTTT
CGCAGCATGAAGAAGAAGAAGAAGAAGAGCCAGACCGTGCCTAACTCCGATTCTCCAGACCTG
CTGACCCTGCAGAAGTCCATCCACAGCGCCTCCACACCCTCTAGCAGACCTAAGGAGTGGAGG
CCTGAGAAGATCAGCGACCTGCAGACCCAGAGCCAGCCACTGAAGTCCCTGCGGAAGCTGCTG
CACCTGTCCTCTGCCAGCAACCACCCAGCCAGCTCCGATCCAAGGTTCCAGCCCCTGACAGCC
CAGCAGACCAAGAACAGCTTCAGCGAGATCAGAATCCACCCTCTGTCCCAGGCCTCTGGAGGC
TCTAGCAACATCAGGCAGGAGCCAGCACCAAAGGGCCGGCCCGCCCTGCAGCTGCCTGGCCAG
ATGGACCCAGGCTGGCACGTGTCCTCTGTGACAAGATCCGCCACCGAGGGCCCATCCTACTCT
GAGCAGCTGGGAGCAAAGAGCGGACCTAATGGACACCCATATCAGAGGACCCAGAGATCCAGG

[chemical structure]

TTCCAGGGCGATTATAAGGACCACGATGGCGACTACAAGGACCACGACATTGACTACAAGGAC
GACGACGATAAAGACGGAGCACCCCATCACCACCACCATCATTGA
DNA sequence for CDKL5_107[1-8,10NQ] (human optimized)
SEQ ID NO: 147
AAGATCCCCAATATCGGCAACGTGATGAATAAGTTCGAGATCCTGGGAGTGGTGGGAGAGGGA
GCCTACGGCGTGGTGCTGAAGTGCAGACACAAGGAGACACACGAGATCGTGGCCATCAAGAAG
TTTAAGGACAGCGAGGAGAATGAGGAGGTGAAGGAGACAACCCTGCGCGAGCTGAAGATGCTG
CGGACACTGAAGCAGGAGAACATCGTGGAGCTGAAGGAGGCCTTCCGGAGAAGGGGCAAGCTG
TACCTGGTGTTTGAGTATGTGGAGAAGAACATGCTGGAGCTGCTGGAGGAGATGCCTAATGGC
GTGCCCCCTGAGAAGGTGAAGTCCTACATCTATCAGCTGATCAAGGCCATCCACTGGTGCCAC
AAGAACGATATCGTGCACCGCGACATCAAGCCCGAGAACCTGCTGATCTCCCACAATGACGTG
CTGAAGCTGTGCGACTTCGGCTTTGCCCGGCAGCTGAGCGAGGGCAACAATGCCCAGTACACA
GAGTATGTGGCCACCCGCTGGTACAGAAGCCCCGAGCTGCTGCTGGGCGCCCCCTATGGCAAG
AGCGTGGATATGTGGTCCGTGGGCTGCATCCTGGGCGAGCTGTCTGATGGCCAGCCTCTGTTC
CCAGGCGAGAGCGAGATCGACCAGCTGTTTACCATCCAGAAGGTGCTGGGCCCTCTGCCAAGC
GAGCAGATGAAGCTGTTCTACTCCAACCCAAGGTTCCACGGCCTGAGGTTTCCAGCCGTGAAT
CACCCTCAGAGCCTGGAGCGCCGGTATCTGGGCATCCTGAACTCCGTGCTGCTGGACCTGATG
AAGAACCTGCTGAAGCTGGACCCCGCCGACAGATACCTGACCGAGCAGTGTCTGAATCACCCT
ACATTTCAGACCCAGAGACTGCTGGATAGGAGCCCTTCCCGCTCTGCCAAGCGGAAGCCATAT
CACGTGGAGAGCAGCACCCTGTCCAATCGCAACCAGGCCGGCAAGTCTACAGCCCTGCAGAGC
CACCACCGGAGCAACTCCAAGGATATCCAGCAGCTGTCCGTGGGCCTGCCTAGGGCCGACGAG
GGCCTGCCAGCA [symbol] GAGAGCTTCCTGAATGGAAACCTGGCAGGAGCCTCTCTGAGCCCACTG
CACACAAAGACCTACCAGGCCTCTAGCCAGCCCGGCTCCACATCTAAGGACCTGACCAACAAT
AACATCCCACACCTGCTGTCTCCCAAGGAGGCCAAGAGCAAGACCGAGTTCGACTTCAACATC
GACCCAAAGCCTAGCGAGGGACCTGGCACAAAGTATCTGAAGAGCAACAGCCGGAGCCAGCAG
AATAGGCACTCCTTCATGGAGTCCTCTCAGTCTAAGGCCGGCACCCTGCAGCCAAACGAGAAG
CAGAGCAGGCACTCCTACATCGACACCATCCCACAGAGCAGCCGGAGCCCCTCCTATCGGACA
AAGGCCAAGTCTCACGGCGCCCTGTCTGATAGCAAGTCCGTGTCTCAGCTGAGCGAGGCCAGA
GCCCAGATCGCAGAGCCCAGCACCTCCAGGTACTTTCCTTCTAGCTGTCTGGATCTGAACTCT
CCTACAAGCCCAACACCCACCAGACACAGCGACACAAGGACCCTGCTGTCTCCAAGCGGCAGA
AATAACAGGAACGAGGGCACCCTGGACAGCCGGCGGACCACAACCAGGCACAGCAAGACAATG
GAGGAGCTGAAGCTGCCAGAGCACATGGATTCCTCTCACTCCCACTCTCTGAGCGCCCCCCAC
GAGTCCTTCTCTTACGGCCTGGGCTATACCTCCCCCTTCAGCAGCCAGCAGCGCCCCCACCGG
CACTCTATGTACGTGACAAGAGATAAGGTGAGGGCAAAGGGCCTGGACGGCAGCCTGTCCATC
GGACAGGGAATGGCAGCCCGGGCCAACTCCCTGCAGCTGCTGTCTCCTCAGCCAGGAGAGCAG
CTGCCACCAGAGATGACCGTGGCACGGAGCAGCGTGAAGGAGACAAGCAGGGAGGGCACCTCC
TCTTTCCACACAAGACAGAAGTCCGAGGGCGGCGTGTATCACGATCCCCACTCTGACGATGGC
ACAGCCCCTAAGGAGAACAGGCACCTGTACAATGACCCCGTGCCTAGGAGGGTGGGCTCCTTC
TATCGCGTGCCATCTCCCCGGCCTGATAATAGCTTTCACGAGAAT [symbol] GTGAGCACCCGGGTG
AGCAGCCTGCCATCTGAGTCTAGCTCCGGCACA [symbol] CACTCTAAGAGGCAGCCCGCCTTTGAC
CCTTGGAAGAGCCCAGAGCAGATCTCTCACAGCGAGCAGCTGAAGGAGAAGGAGAAGCAGGGC
TTCTTTCGCAGCATGAAGAAGAAGAAGAAGAAGAGCCAGACCGTGCCTAACTCCGATTCTCCA
GACCTGCTGACCCTGCAGAAGTCCATCCACAGCGCCTCCACACCCTCTAGCAGACCTAAGGAG
TGGAGGCCTGAGAAGATCAGCGACCTGCAGACCCAGAGCCAGCCACTGAAGTCCCTGCGGAAG
CTGCTGCACCTGTCCTCTGCCAGCAACCACCCAGCCAGCTCCGATCCAAGGTTCCAGCCCCTG
ACAGCCCAGCAGACCAAGAACAGCTTCAGCGAGATCAGAATCCACCCTCTGTCCCAGGCCTCT
GGAGGCTCTAGCAACATCAGGCAGGAGCCAGCACCAAAGGGCCGGCCCGCCCTGCAGCTGCCT
GGCCAGATGGACCCAGGCTGGCACGTGTCCTCTGTGACAAGATCCGCCACCGAGGGCCCATCC
TACTCTGAGCAGCTGGGAGCAAAGAGCGGACCTAATGGACACCCATATCAGAGGACCCAGAGA
TCCAGGATGCCCAATCTGAACGATCTGAAGGAGACAGCCCTG
DNA sequence for MBIP-TATκ28-CDKL5_107-FH [1-9NQ]
(human optimized)
SEQ ID NO: 148
ATGAAGCTGTCCCTGGTGGCCGCTATGCTGCTGCTGCTGTCTCTGGTCGCTGCCATGTTATTA
CTGCTGTCTGCCGCTAGGGCCGGGGACGCAGCACAGCCCGCAAGAAGAGCAAGAAGAACTAAA
CTGGCCGCTTACGCAAGGAAGGCAGCAAGACAGGCAAGAGCAGGCGGCGGCGGCTCCAAGATC
CCCAATATCGGCAACGTGATGAATAAGTTCGAGATCCTGGGAGTGGTGGGAGAGGGAGCCTAC
GGCGTGGTGCTGAAGTGCAGACACAAGGAGACACACGAGATCGTGGCCATCAAGAAGTTTAAG
GACAGCGAGGAGAATGAGGAGGTGAAGGAGACAACCCTGCGCGAGCTGAAGATGCTGCGGACA
CTGAAGCAGGAGAACATCGTGGAGCTGAAGGAGGCCTTCCGGAGAAGGGGCAAGCTGTACCTG
GTGTTTGAGTATGTGGAGAAGAACATGCTGGAGCTGCTGGAGGAGATGCCTAATGGCGTGCCC
CCTGAGAAGGTGAAGTCCTACATCTATCAGCTGATCAAGGCCATCCACTGGTGCCACAAGAAC
GATATCGTGCACCGCGACATCAAGCCCGAGAACCTGCTGATCTCCCACAATGACGTGCTGAAG
CTGTGCGACTTCGGCTTTGCCCGGCAGCTGAGCGAGGGCAACAATGCCCAGTACACAGAGTAT
GTGGCCACCCGCTGGTACAGAAGCCCCGAGCTGCTGCTGGGCGCCCCCTATGGCAAGAGCGTG
GATATGTGGTCCGTGGGCTGCATCCTGGGCGAGCTGTCTGATGGCCAGCCTCTGTTCCCAGGC
GAGAGCGAGATCGACCAGCTGTTTACCATCCAGAAGGTGCTGGGCCCTCTGCCAAGCGAGCAG
ATGAAGCTGTTCTACTCCAACCCAAGGTTCCACGGCCTGAGGTTTCCAGCCGTGAATCACCCT
CAGAGCCTGGAGCGCCGGTATCTGGGCATCCTGAACTCCGTGCTGCTGGACCTGATGAAGAAC
CTGCTGAAGCTGGACCCCGCCGACAGATACCTGACCGAGCAGTGTCTGAATCACCCTACATTT
CAGACCCAGAGACTGCTGGATAGGAGCCCTTCCCGCTCTGCCAAGCGGAAGCCATATCACGTG
GAGAGCAGCACCCTGTCCAATCGCAACCAGGCCGGCAAGTCTACAGCCCTGCAGAGCCACCAC
CGGAGCAACTCCAAGGATATCCAGCAGCTGTCCGTGGGCCTGCCTAGGGCCGACGAGGGCCTG
CCAGCA [symbol] GAGAGCTTCCTGAATGGAAACCTGGCAGGAGCCTCTCTGAGCCCACTGCACACA
AAGACCTACCAGGCCTCTAGCCAGCCCGGCTCCACATCTAAGGACCTGACCAACAATAACATC
CCACACCTGCTGTCTCCCAAGGAGGCCAAGAGCAAGACCGAGTTCGACTTCAACATCGACCCA
AAGCCTAGCGAGGGACCTGGCACAAAGTATCTGAAGAGCAACAGCCGGAGCCAGCAGAATAGG
CACTCCTTCATGGAGTCCTCTCAGTCTAAGGCCGGCACCCTGCAGCCAAACGAGAAGCAGAGC
AGGCACTCCTACATCGACACCATCCCACAGAGCAGCCGGAGCCCCTCCTATCGGACAAAGGCC
AAGTCTCACGGCGCCCTGTCTGATAGCAAGTCCGTGTCTCAGCTGAGCGAGGCCAGAGCCCAG
ATCGCAGAGCCCAGCACCTCCAGGTACTTTCCTTCTAGCTGTCTGGATCTGAACTCTCCTACA
AGCCCAACACCCACCAGACACAGCGACACAAGGACCCTGCTGTCTCCAAGCGGCAGAAATAAC
AGGAACGAGGGCACCCTGGACAGCCGGCGGACCACAACCAGGCACAGCAAGACAATGGAGGAG
CTGAAGCTGCCAGAGCACATGGATTCCTCTCACTCCCACTCTCTGAGCGCCCCCCACGAGTCC
TTCTCTTACGGCCTGGGCTATACCTCCCCCTTCAGCAGCCAGCAGCGCCCCCACCGGCACTCT
ATGTACGTGACAAGAGATAAGGTGAGGGCAAAGGGCCTGGACGGCAGCCTGTCCATCGGACAG
GGAATGGCAGCCCGGGCCAACTCCCTGCAGCTGCTGTCTCCTCAGCCAGGAGAGCAGCTGCCA
CCAGAGATGACCGTGGCACGGAGCAGCGTGAAGGAGACAAGCAGGGAGGGCACCTCCTCTTTC
CACACAAGACAGAAGTCCGAGGGCGGCGTGTATCACGATCCCCACTCTGACGATGGCACAGCC
CCTAAGGAGAACAGGCACCTGTACAATGACCCCGTGCCTAGGAGGGTGGGCTCCTTCTATCGC
GTGCCATCTCCCCGGCCTGATAATAGCTTTCACGAGAAT [symbol] GTGAGCACCCGGGTGAGCAGC
CTGCCATCTGAGTCTAGCTCCGGCACA [symbol] CACTCTAAGAGGCAGCCCGCCTTTGACCCTTGG
AAGAGCCCAGAGCAGATCTCTCACAGCGAGCAGCTGAAGGAGAAGGAGAAGCAGGGCTTCTTT
CGCAGCATGAAGAAGAAGAAGAAGAAGAGCCAGACCGTGCCTAACTCCGATTCTCCAGACCTG
CTGACCCTGCAGAAGTCCATCCACAGCGCCTCCACACCCTCTAGCAGACCTAAGGAGTGGAGG
CCTGAGAAGATCAGCGACCTGCAGACCCAGAGCCAGCCACTGAAGTCCCTGCGGAAGCTGCTG
CACCTGTCCTCTGCCAGCAACCACCCAGCCAGCTCCGATCCAAGGTTCCAGCCCCTGACAGCC
CAGCAGACCAAGAACAGCTTCAGCGAGATCAGAATCCACCCTCTGTCCCAGGCCTCTGGAGGC
TCTAGCAACATCAGGCAGGAGCCAGCACCAAAGGGCCGGCCCGCCCTGCAGCTGCCTGGCCAG
ATGGACCCAGGCTGGCACGTGTCCTCTGTGACAAGATCCGCCACCGAGGGCCCATCCTACTCT
GAGCAGCTGGGAGCAAAGAGCGGACCTAATGGACACCCATATCAGAGGACCCAGAGATCCAGG

[chemical structure]

TTCCAGGGCGATTATAAGGACCACGATGGCGACTACAAGGACCACGACATTGACTACAAGGAC
GACGACGATAAAGACGGAGCACCCCATCACCACCACCATCATTGA
DNA sequence for CDKL5_107[1-9NQ] (human optimized)
SEQ ID NO: 149
AAGATCCCCAATATCGGCAACGTGATGAATAAGTTCGAGATCCTGGGAGTGGTGGGAGAGGGA
GCCTACGGCGTGGTGCTGAAGTGCAGACACAAGGAGACACACGAGATCGTGGCCATCAAGAAG
TTTAAGGACAGCGAGGAGAATGAGGAGGTGAAGGAGACAACCCTGCGCGAGCTGAAGATGCTG
CGGACACTGAAGCAGGAGAACATCGTGGAGCTGAAGGAGGCCTTCCGGAGAAGGGGCAAGCTG
TACCTGGTGTTTGAGTATGTGGAGAAGAACATGCTGGAGCTGCTGGAGGAGATGCCTAATGGC
GTGCCCCCTGAGAAGGTGAAGTCCTACATCTATCAGCTGATCAAGGCCATCCACTGGTGCCAC
AAGAACGATATCGTGCACCGCGACATCAAGCCCGAGAACCTGCTGATCTCCCACAATGACGTG
CTGAAGCTGTGCGACTTCGGCTTTGCCCGGCAGCTGAGCGAGGGCAACAATGCCCAGTACACA
GAGTATGTGGCCACCCGCTGGTACAGAAGCCCCGAGCTGCTGCTGGGCGCCCCCTATGGCAAG
AGCGTGGATATGTGGTCCGTGGGCTGCATCCTGGGCGAGCTGTCTGATGGCCAGCCTCTGTTC
CCAGGCGAGAGCGAGATCGACCAGCTGTTTACCATCCAGAAGGTGCTGGGCCCTCTGCCAAGC
GAGCAGATGAAGCTGTTCTACTCCAACCCAAGGTTCCACGGCCTGAGGTTTCCAGCCGTGAAT
CACCCTCAGAGCCTGGAGCGCCGGTATCTGGGCATCCTGAACTCCGTGCTGCTGGACCTGATG
AAGAACCTGCTGAAGCTGGACCCCGCCGACAGATACCTGACCGAGCAGTGTCTGAATCACCCT
ACATTTCAGACCCAGAGACTGCTGGATAGGAGCCCTTCCCGCTCTGCCAAGCGGAAGCCATAT
CACGTGGAGAGCAGCACCCTGTCCAATCGCAACCAGGCCGGCAAGTCTACAGCCCTGCAGAGC
CACCACCGGAGCAACTCCAAGGATATCCAGCAGCTGTCCGTGGGCCTGCCTAGGGCCGACGAG
GGCCTGCCAGCA [symbol] GAGAGCTTCCTGAATGGAAACCTGGCAGGAGCCTCTCTGAGCCCACTG
CACACAAAGACCTACCAGGCCTCTAGCCAGCCCGGCTCCACATCTAAGGACCTGACCAACAAT
AACATCCCACACCTGCTGTCTCCCAAGGAGGCCAAGAGCAAGACCGAGTTCGACTTCAACATC
GACCCAAAGCCTAGCGAGGGACCTGGCACAAAGTATCTGAAGAGCAACAGCCGGAGCCAGCAG
AATAGGCACTCCTTCATGGAGTCCTCTCAGTCTAAGGCCGGCACCCTGCAGCCAAACGAGAAG
CAGAGCAGGCACTCCTACATCGACACCATCCCACAGAGCAGCCGGAGCCCCTCCTATCGGACA
AAGGCCAAGTCTCACGGCGCCCTGTCTGATAGCAAGTCCGTGTCTCAGCTGAGCGAGGCCAGA
GCCCAGATCGCAGAGCCCAGCACCTCCAGGTACTTTCCTTCTAGCTGTCTGGATCTGAACTCT
CCTACAAGCCCAACACCCACCAGACACAGCGACACAAGGACCCTGCTGTCTCCAAGCGGCAGA
AATAACAGGAACGAGGGCACCCTGGACAGCCGGCGGACCACAACCAGGCACAGCAAGACAATG
GAGGAGCTGAAGCTGCCAGAGCACATGGATTCCTCTCACTCCCACTCTCTGAGCGCCCCCCAC
GAGTCCTTCTCTTACGGCCTGGGCTATACCTCCCCCTTCAGCAGCCAGCAGCGCCCCCACCGG
CACTCTATGTACGTGACAAGAGATAAGGTGAGGGCAAAGGGCCTGGACGGCAGCCTGTCCATC
GGACAGGGAATGGCAGCCCGGGCCAACTCCCTGCAGCTGCTGTCTCCTCAGCCAGGAGAGCAG
CTGCCACCAGAGATGACCGTGGCACGGAGCAGCGTGAAGGAGACAAGCAGGGAGGGCACCTCC
TCTTTCCACACAAGACAGAAGTCCGAGGGCGGCGTGTATCACGATCCCCACTCTGACGATGGC
ACAGCCCCTAAGGAGAACAGGCACCTGTACAATGACCCCGTGCCTAGGAGGGTGGGCTCCTTC
TATCGCGTGCCATCTCCCCGGCCTGATAATAGCTTTCACGAGAAT [symbol] GTGAGCACCCGGGTG
AGCAGCCTGCCATCTGAGTCTAGCTCCGGCACA [symbol] CACTCTAAGAGGCAGCCCGCCTTTGAC
CCTTGGAAGAGCCCAGAGCAGATCTCTCACAGCGAGCAGCTGAAGGAGAAGGAGAAGCAGGGC
TTCTTTCGCAGCATGAAGAAGAAGAAGAAGAAGAGCCAGACCGTGCCTAACTCCGATTCTCCA
GACCTGCTGACCCTGCAGAAGTCCATCCACAGCGCCTCCACACCCTCTAGCAGACCTAAGGAG
TGGAGGCCTGAGAAGATCAGCGACCTGCAGACCCAGAGCCAGCCACTGAAGTCCCTGCGGAAG
CTGCTGCACCTGTCCTCTGCCAGCAACCACCCAGCCAGCTCCGATCCAAGGTTCCAGCCCCTG
ACAGCCCAGCAGACCAAGAACAGCTTCAGCGAGATCAGAATCCACCCTCTGTCCCAGGCCTCT
GGAGGCTCTAGCAACATCAGGCAGGAGCCAGCACCAAAGGGCCGGCCCGCCCTGCAGCTGCCT
GGCCAGATGGACCCAGGCTGGCACGTGTCCTCTGTGACAAGATCCGCCACCGAGGGCCCATCC
TACTCTGAGCAGCTGGGAGCAAAGAGCGGACCTAATGGACACCCATATCAGAGGACCCAGAGA
TCCAGGATGCCCAATCTGAACGATCTGAAGGAGACAGCCCTG
DNA sequence for TATκ11 (human optimized)
SEQ ID NO: 150
TACGCCCGGAAGGCCGCCCGGCAGGCCAGAGCC
DNA sequence for TATk28 (human optimized)
SEQ ID NO: 151
GACGCAGCACAGCCCGCAAGAAGAGCAAGAAGAACTAAACTGGCCGCTTACGCAAGGAAGGCA
GCAAGACAGGCAAGAGCA
DNA sequence for Antennapedia CPP (human optimized)
SEQ ID NO: 152
CGGCAGATCAAGATTTGGTTCCAGAACCGGAGAATGAAGTGGAAGAAG
DNA sequence for Transportan CPP (human optimized)
SEQ ID NO: 153
GCCGGCTACCTGCTGGGCAAGATCAACCTGAAGGCCCTGGCCGCCCTGGCCAAGAAGATCCTG
DNA sequence for P97 CPP (human optimized)
SEQ ID NO: 154
GACAGCTCCCACGCCTTCACCCTGGATGAGCTGCGG
DNA sequence for mBIP (human optimized)
SEQ ID NO: 155
ATGAAGCTGTCCCTGGTGGCCGCTATGCTGCTGCTGCTGTCTCTGGTCGCTGCCATGTTATTA
CTGCTGTCTGCCGCTAGGGCC
IGF
SEQ ID NO: 156
AYRPSETLCGGELVDTLQFVCGDRGFYFSRPASRVSRRSRGIVEECCFRSCDLALLETYCATP
AKSE
IGF F26S
SEQ ID NO: 157
AYRPSETLCGGELVDTLQFVCGDRGSYFSRPASRVSRRSRGIVEECCFRSCDLALLETYCATP
AKSE
IGF Y27L
SEQ ID NO: 158
AYRPSETLCGGELVDTLQFVCGDRGFLFSRPASRVSRRSRGIVEECCFRSCDLALLETYCATP
AKSE
IGF V43L
SEQ ID NO: 159
AYRPSETLCGGELVDTLQFVCGDRGFYFSRPASRVSRRSRGILEECCFRSCDLALLETYCATP
AKSE
IGF F48T
SEQ ID NO: 160
AYRPSETLCGGELVDTLQFVCGDRGFYFSRPASRVSRRSRGIVEECCTRSCDLALLETYCATP
AKSE
IGF R49S
SEQ ID NO: 161
AYRPSETLCGGELVDTLQFVCGDRGFYFSRPASRVSRRSRGIVEECCFSSCDLALLETYCATP
AKSE
IGF S50I
SEQ ID NO: 162
AYRPSETLCGGELVDTLQFVCGDRGFYFSRPASRVSRRSRGIVEECCFRICDLALLETYCATP
AKSE
IGF A54R
SEQ ID NO: 163
AYRPSETLCGGELVDTLQFVCGDRGFYFSRPASRVSRRSRGIVEECCFRSCDLRLLETYCATP
AKSE
IGF L55R
SEQ ID NO: 164
AYRPSETLCGGELVDTLQFVCGDRGFYFSRPASRVSRRSRGIVEECCFRSCDLARLETYCATP
AKSE
IGF F26S, Y27L, V43L, F48T, R49S, S50I, A54R, L55R
SEQ ID NO: 165
AYRPSETLCGGELVDTLQFVCGDRGSLFSRPASRVSRRSRGILEECCTSICDLRRLETYCATP
AKSE
IGF ΔA1-7, Y27L, K65R
SEQ ID NO: 166
TLCGGELVDTLQFVCGDRGFLFSRPASRVSRRSRGIVEECCFRSCDLALLETYCATPARSE
TATκκ28 CPP
SEQ ID NO: 167
DAAQPARRAARTKLAAYARKAARQARA
mvBIP
SEQ ID NO: 168
MVKLSLVAAMLLLLSLVAAMLLLLSAARA
Exemplary DNA sequence for mvBIP
SEQ ID NO: 169
ATGAAGCTGTCCCTGGTGGCCGCTATGCTGCTGCTGCTGTCTCTGGTCGCTGCCATGTTATTA
CTGCTGTCTGCCGCTAGGGCC
Exemplary DNA sequence for TATκκ28
SEQ ID NO: 170
TCTGATGCTGCCCAGCCTGCTAGAAGGGCCGCCAGGACAAAACTGGCCGCCTATGCCAGAAAA
GCCGCCAGACAGGCCAGAGCC
Exemplary DNA sequence for TATκκ28
SEQ ID NO: 171
AGCGACGCCGCTCAACCAGCTCGACGCGCCGCCAGAACCAAGCTGGCCGCCTACGCCCGGAAG
GCCGCCAGACAGGCCAGAGCC
Exemplary DNA sequence for TATκκ28
SEQ ID NO: 172
AGCGACGCCGCCCAGCCCGCCAGAAGAGCCGCCAGAACCAAGCTGGCCGCCTACGCCAGAAAG
GCCGCCAGACAGGCCAGAGCC
Exemplary DNA sequence for TATκκ28
SEQ ID NO: 173
TCTGATGCCGCCCAGCCTGCCAGACGGGCTGCACGGACGAAGCTGGCCGCCTACGCCAGAAAG
GCGGCCAGACAGGCCAGAGCC
TwinStrep-3cV2-TATκ28-hCDKL5-Flag-His-HPC4
(Amino Acid Sequence)
SEQ ID NO: 174
MSAWSHPQFEKGGGSGGGSGGSAWSHPQFEKGSLEVLFQGPDAAQPARRARRTKLAAYARKAA
RQARAGGGGSKIPNIGNVMNKFEILGVVGEGAYGVVLKCRHKETHEIVAIKKFKDSEENEEVK
ETTLRELKMLRTLKQENIVELKEAFRRRGKLYLVFEYVEKNMLELLEEMPNGVPPEKVKSYIY
QLIKAIHWCHKNDIVHRDIKPENLLISHNDVLKLCDFGFARNLSEGNNANYTEYVATRWYRSP
ELLLGAPYGKSVDMWSVGCILGELSDGQPLFPGESEIDQLFTIQKVLGPLPSEQMKLFYSNPR
FHGLRFPAVNHPQSLERRYLGILNSVLLDLMKNLLKLDPADRYLTEQCLNHPTFQTQRLLDRS
PSRSAKRKPYHVESSTLSNRNQAGKSTALQSHHRSNSKDIQNLSVGLPRADEGLPANESFLNG
NLAGASLSPLHTKTYQASSQPGSTSKDLTNNNIPHLLSPKEAKSKTEFDFNIDPKPSEGPGTK
YLKSNSRSQQNRHSFMESSQSKAGTLQPNEKQSRHSYIDTIPQSSRSPSYRTKAKSHGALSDS
KSVSNLSEARAQIAEPSTSRYFPSSCLDLNSPTSPTPTRHSDTRTLLSPSGRNNRNEGTLDSR
RTTTRHSKTMEELKLPEHMDSSHSHSLSAPHESFSYGLGYTSPFSSQQRPHRHSMYVTRDKVR
AKGLDGSLSIGQGMAARANSLQLLSPQPGEQLPPEMTVARSSVKETSREGTSSFHTRQKSEGG
VYHDPHSDDGTAPKENRHLYNDPVPRRVGSFYRVPSPRPDNSFHENNVSTRVSSLPSESSSGT
NHSKRQPAFDPWKSPENISHSEQLKEKEKQGFFRSMKKKKKKSQTVPNSDSPDLLTLQKSIHS
ASTPSSRPKEWRPEKISDLQTQSQPLKSLRKLLHLSSASNHPASSDPRFQPLTAQQTKNSFSE
IRIHPLSQASGGSSNIRQEPAPKGRPALQLPGQMDPGWHVSSVTRSATEGPSYSEQLGAKSGP
NGHPYNRTNRSRMPNLNDLKETALGAGGGGSLEVLFQGPDYKDHDGDYKDHDIDYKDDDDKDG
APHHHHHHEDQVDPRLIDGK
TwinStrep-3cV2-TATκ28-hCDKL5-Flag-His-HPC4 (DNA Sequence)
SEQ ID NO: 175
ATGTCAGCGTGGTCGCATCCTCAATTCGAAAAGGGCGGCGGTTCGGGTGGAGGAAGTGGCGGA
TCGGCCTGGTCTCACCCGCAATTCGAAAAGGGTTCCCTcGAgGTcCTTTTtCAAGGTCCcGAC
GCTGCTCAGCCTGCTCGCCGTGCCAGGAGAACCAAGCTGGCTGCCTACGCTCGTAAGGCTGCT
AGACAAGCTAGGGCCGGTGGCGGAGGTAGCAAGATCCCAAACATCGGTAACGTGATGAACAAG
TTCGAGATCCTGGGCGTGGTCGGTGAAGGCGCTTACGGAGTGGTCCTGAAGTGCAGGCACAAG
GAGACCCACGAAATCGTGGCCATCAAGAAGTTCAAGGACTCTGAGGAAAACGAGGAAGTCAAA
GAGACCACTCTGCGTGAACTGAAGATGCTGAGGACTCTGAAGCAGGAGAACATCGTCGAGCTG
AAGGAAGCTTTCCGCCGTAGGGGAAAGCTGTACCTGGTGTTCGAGTACGTCGAAAAGAACATG
CTGGAGCTGCTGGAGGAAATGCCAAACGGTGTGCCTCCCGAAAAGGTCAAGAGCTACATCTAC
CAGCTGATCAAGGCCATCCACTGGTGCCACAAGAACGACATCGTGCACCGTGACATCAAGCCT
GAGAACCTGCTGATCAGCCACAACGACGTCCTGAAGCTGTGCGACTTCGGTTTCGCTAGGAAC
CTGTCTGAGGGCAACAACGCTAACTACACTGAATACGTGGCCACCCGTTGGTACAGGTCTCCA
GAGCTGCTGCTGGGTGCCCCTTACGGCAAGTCTGTGGACATGTGGTCTGTCGGATGCATCCTG
GGTGAACTGAGCGACGGACAGCCCCTGTTCCCAGGAGAGTCTGAAATCGACCAGCTGTTCACC
ATCCAGAAGGTCCTGGGCCCCCTGCCAAGCGAGCAGATGAAGCTGTTCTACTCTAACCCCCGT
TTCCACGGACTGAGGTTCCCTGCTGTGAACCACCCCCAGAGCCTGGAAAGACGCTACCTGGGT
ATCCTGAACTCTGTCCTGCTGGACCTGATGAAGAACCTGCTGAAGCTGGACCCTGCTGACCGC
TACCTGACCGAGCAGTGCCTGAACCACCCCACTTTCCAGACCCAGAGACTGCTGGACCGCAGC
CCCTCTCGTTCAGCCAAGAGGAAGCCATACCACGTGGAATCCAGCACCCTGAGCAACCGTAAC
CAGGCTGGCAAGTCCACTGCCCTGCAGAGCCACCACAGGTCCAACAGCAAGGACATCCAAAAC
CTGTCAGTGGGACTGCCAAGGGCTGACGAGGGACTGCCAGCCAACGAATCCTTCCTGAACGGC
AACCTGGCTGGAGCCTCTCTGTCACCACTGCACACTAAGACCTACCAGGCTTCTTCACAGCCT
GGTTCCACTAGCAAGGACCTGACCAACAACAACATCCCACACCTGCTGTCTCCTAAGGAAGCT
AAATCAAAGACCGAGTTCGACTTCAACATCGACCCTAAGCCCTCCGAGGGACCTGGTACTAAG
TACCTGAAGTCTAACTCAAGATCCCAGCAGAACCGCCACTCATTCATGGAGTCCAGCCAGTCC
AAGGCTGGTACCCTGCAGCCCAACGAAAAGCAGTCCCGCCACAGCTACATCGACACCATCCCT
CAGTCTTCACGTAGCCCCTCTTACAGGACTAAGGCTAAGAGCCACGGCGCCCTGTCAGACTCC
AAGAGCGTGTCTAACCTGTCTGAGGCTAGAGCCCAGATCGCCGAACCTTCAACCTCCCGCTAC
TTCCCCTCCAGCTGCCTGGACCTGAACTCTCCCACTTCACCAACTCCTACCAGACACTCCGAC
ACTCGCACCCTGCTGAGCCCATCTGGTAGAAACAACCGCAACGAGGGCACCCTGGACTCACGT
AGGACCACTACCCGTCACTCCAAGACTATGGAGGAACTGAAGCTGCCAGAGCACATGGACTCT
TCACACTCACACTCCCTGAGCGCTCCTCACGAATCTTTCTCATACGGCCTGGGATACACCAGC
CCATTCTCCAGCCAGCAGCGTCCTCACAGGCACTCTATGTACGTGACTAGAGACAAGGTCCGC
GCTAAGGGACTGGACGGTTCCCTGTCTATCGGTCAGGGAATGGCTGCTAGGGCCAACTCTCTG
CAGCTGCTGTCACCCCAGCCAGGAGAGCAGCTGCCACCTGAAATGACCGTGGCTAGATCTTCA
GTCAAGGAGACTTCCCGCGAAGGCACCTCCAGCTTCCACACTAGACAGAAGTCAGAGGGCGGA
GTGTACCACGACCCTCACTCTGACGACGGAACTGCTCCCAAGGAAAACCGCCACCTGTACAAC
GACCCTGTGCCCAGACGCGTCGGATCCTTCTACCGTGTCCCAAGCCCTAGGCCCGACAACTCT
TTCCACGAGAACAACGTGAGCACCAGAGTCTCTTCACTGCCCTCTGAATCCAGCTCTGGCACT
AACCACTCAAAGCGCCAGCCTGCTTTCGACCCCTGGAAGTCCCCAGAGAACATCTCTCACTCA
GAACAGCTGAAGGAGAAGGAAAAGCAGGGATTCTTCCGCTCAATGAAGAAGAAGAAGAAGAAG
TCCCAGACCGTGCCCAACTCCGACAGCCCAGACCTGCTGACCCTGCAGAAGTCAATCCACTCT
GCCTCAACTCCTTCATCCAGACCCAAGGAGTGGCGCCCCGAAAAGATCTCCGACCTGCAGACT
CAGTCCCAGCCACTGAAGAGCCTGCGTAAGCTGCTGCACCTGAGCTCTGCTTCCAACCACCCT
GCCTCATCCGACCCACGTTTCCAGCCTCTGACTGCTCAGCAGACCAAGAACTCCTTCAGCGAG
ATCAGGATCCACCCACTGTCCCAGGCTAGCGGTGGCAGCTCTAACATCCGTCAGGAACCAGCT
CCTAAGGGACGTCCAGCTCTGCAGCTGCCTGGTCAGATGGACCCAGGCTGGCACGTGTCATCC
GTCACTAGATCAGCTACCGAGGGACCATCTTACTCAGAACAGCTGGGTGCCAAGTCAGGCCCC
AACGGACACCCATACAACCGCACCAACCGTTCCAGGATGCCTAACCTGAACGACCTGAAGGAG
ACTGCTCTGGGgGCCGGAGGTGGCGGATCCCTgGAaGTgCTgTTcCAgGGcCCTGACTACAAG
GACCACGACGGTGACTACAAAGATCACGACATCGACTACAAGGACGACGACGACAAGGACGGT
GCCCCACACCACCACCACCACCACGAAGATCAGGTGGATCCTCGCCTGATCGATGGCAAGTAA
TwinStrep-3cV2-TATκ28-hCDKL5-Flag-His-TwinStrep
(Amino Acid Sequence)
SEQ ID NO: 176
MSAWSHPQFEKGGGSGGGSGGSAWSHPQFEKGSLEVLFQGPDAAQPARRARRTKLAAYARKAA
RQARAGGGGSKIPNIGNVMNKFEILGVVGEGAYGVVLKCRHKETHEIVAIKKFKDSEENEEVK
ETTLRELKMLRTLKQENIVELKEAFRRRGKLYLVFEYVEKNMLELLEEMPNGVPPEKVKSYIY
QLIKAIHWCHKNDIVHRDIKPENLLISHNDVLKLCDFGFARNLSEGNNANYTEYVATRWYRSP
ELLLGAPYGKSVDMWSVGCILGELSDGQPLFPGESEIDQLFTIQKVLGPLPSEQMKLFYSNPR
FHGLRFPAVNHPQSLERRYLGILNSVLLDLMKNLLKLDPADRYLTEQCLNHPTFQTQRLLDRS
PSRSAKRKPYHVESSTLSNRNQAGKSTALQSHHRSNSKDIQNLSVGLPRADEGLPANESFLNG
NLAGASLSPLHTKTYQASSQPGSTSKDLTNNNIPHLLSPKEAKSKTEFDFNIDPKPSEGPGTK
YLKSNSRSQQNRHSFMESSQSKAGTLQPNEKQSRHSYIDTIPQSSRSPSYRTKAKSHGALSDS
KSVSNLSEARAQIAEPSTSRYFPSSCLDLNSPTSPTPTRHSDTRTLLSPSGRNNRNEGTLDSR
RTTTRHSKTMEELKLPEHMDSSHSHSLSAPHESFSYGLGYTSPFSSQQRPHRHSMYVTRDKVR
AKGLDGSLSIGQGMAARANSLQLLSPQPGEQLPPEMTVARSSVKETSREGTSSFHTRQKSEGG
VYHDPHSDDGTAPKENRHLYNDPVPRRVGSFYRVPSPRPDNSFHENNVSTRVSSLPSESSSGT
NHSKRQPAFDPWKSPENISHSEQLKEKEKQGFFRSMKKKKKKSQTVPNSDSPDLLTLQKSIHS
ASTPSSRPKEWRPEKISDLQTQSQPLKSLRKLLHLSSASNHPASSDPRFQPLTAQQTKNSFSE
IRIHPLSQASGGSSNIRQEPAPKGRPALQLPGQMDPGWHVSSVTRSATEGPSYSEQLGAKSGP
NGHPYNRTNRSRMPNLNDLKETALGAGGGGSLEVLFQGPDYKDHDGDYKDHDIDYKDDDDKDG
APHHHHHHSAWSHPQFEKGGGSGGGSGGSAWSHPQFEK*
TwinStrep-3cV2-TATκ28-hCDKL5-Flag-His-TwinStrep (DNA Sequence)
SEQ ID NO: 177
ATGTCAGCGTGGTCGCATCCTCAATTCGAAAAGGGCGGCGGTTCGGGTGGAGGAAGTGGCGGA
TCGGCCTGGTCTCACCCGCAATTCGAAAAGGGTTCCCTcGAgGTcCTgTTtCAgGGcCCcGAC
GCTGCTCAGCCTGCTCGCCGTGCCAGGAGAACCAAGCTGGCTGCCTACGCTCGTAAGGCTGCT
AGACAAGCTAGGGCCGGTGGCGGAGGTAGCAAGATCCCAAACATCGGTAACGTGATGAACAAG
TTCGAGATCCTGGGCGTGGTCGGTGAAGGCGCTTACGGAGTGGTCCTGAAGTGCAGGCACAAG
GAGACCCACGAAATCGTGGCCATCAAGAAGTTCAAGGACTCTGAGGAAAACGAGGAAGTCAAA
GAGACCACTCTGCGTGAACTGAAGATGCTGAGGACTCTGAAGCAGGAGAACATCGTCGAGCTG
AAGGAAGCTTTCCGCCGTAGGGGAAAGCTGTACCTGGTGTTCGAGTACGTCGAAAAGAACATG
CTGGAGCTGCTGGAGGAAATGCCAAACGGTGTGCCTCCCGAAAAGGTCAAGAGCTACATCTAC
CAGCTGATCAAGGCCATCCACTGGTGCCACAAGAACGACATCGTGCACCGTGACATCAAGCCT
GAGAACCTGCTGATCAGCCACAACGACGTCCTGAAGCTGTGCGACTTCGGTTTCGCTAGGAAC
CTGTCTGAGGGCAACAACGCTAACTACACTGAATACGTGGCCACCCGTTGGTACAGGTCTCCA
GAGCTGCTGCTGGGTGCCCCTTACGGCAAGTCTGTGGACATGTGGTCTGTCGGATGCATCCTG
GGTGAACTGAGCGACGGACAGCCCCTGTTCCCAGGAGAGTCTGAAATCGACCAGCTGTTCACC
ATCCAGAAGGTCCTGGGCCCCCTGCCAAGCGAGCAGATGAAGCTGTTCTACTCTAACCCCCGT
TTCCACGGACTGAGGTTCCCTGCTGTGAACCACCCCCAGAGCCTGGAAAGACGCTACCTGGGT
ATCCTGAACTCTGTCCTGCTGGACCTGATGAAGAACCTGCTGAAGCTGGACCCTGCTGACCGC
TACCTGACCGAGCAGTGCCTGAACCACCCCACTTTCCAGACCCAGAGACTGCTGGACCGCAGC
CCCTCTCGTTCAGCCAAGAGGAAGCCATACCACGTGGAATCCAGCACCCTGAGCAACCGTAAC
CAGGCTGGCAAGTCCACTGCCCTGCAGAGCCACCACAGGTCCAACAGCAAGGACATCCAAAAC
CTGTCAGTGGGACTGCCAAGGGCTGACGAGGGACTGCCAGCCAACGAATCCTTCCTGAACGGC
AACCTGGCTGGAGCCTCTCTGTCACCACTGCACACTAAGACCTACCAGGCTTCTTCACAGCCT
GGTTCCACTAGCAAGGACCTGACCAACAACAACATCCCACACCTGCTGTCTCCTAAGGAAGCT
AAATCAAAGACCGAGTTCGACTTCAACATCGACCCTAAGCCCTCCGAGGGACCTGGTACTAAG
TACCTGAAGTCTAACTCAAGATCCCAGCAGAACCGCCACTCATTCATGGAGTCCAGCCAGTCC
AAGGCTGGTACCCTGCAGCCCAACGAAAAGCAGTCCCGCCACAGCTACATCGACACCATCCCT
CAGTCTTCACGTAGCCCCTCTTACAGGACTAAGGCTAAGAGCCACGGCGCCCTGTCAGACTCC
AAGAGCGTGTCTAACCTGTCTGAGGCTAGAGCCCAGATCGCCGAACCTTCAACCTCCCGCTAC
TTCCCCTCCAGCTGCCTGGACCTGAACTCTCCCACTTCACCAACTCCTACCAGACACTCCGAC
ACTCGCACCCTGCTGAGCCCATCTGGTAGAAACAACCGCAACGAGGGCACCCTGGACTCACGT
AGGACCACTACCCGTCACTCCAAGACTATGGAGGAACTGAAGCTGCCAGAGCACATGGACTCT
TCACACTCACACTCCCTGAGCGCTCCTCACGAATCTTTCTCATACGGCCTGGGATACACCAGC
CCATTCTCCAGCCAGCAGCGTCCTCACAGGCACTCTATGTACGTGACTAGAGACAAGGTCCGC
GCTAAGGGACTGGACGGTTCCCTGTCTATCGGTCAGGGAATGGCTGCTAGGGCCAACTCTCTG
CAGCTGCTGTCACCCCAGCCAGGAGAGCAGCTGCCACCTGAAATGACCGTGGCTAGATCTTCA
GTCAAGGAGACTTCCCGCGAAGGCACCTCCAGCTTCCACACTAGACAGAAGTCAGAGGGCGGA
GTGTACCACGACCCTCACTCTGACGACGGAACTGCTCCCAAGGAAAACCGCCACCTGTACAAC
GACCCTGTGCCCAGACGCGTCGGATCCTTCTACCGTGTCCCAAGCCCTAGGCCCGACAACTCT
TTCCACGAGAACAACGTGAGCACCAGAGTCTCTTCACTGCCCTCTGAATCCAGCTCTGGCACT
AACCACTCAAAGCGCCAGCCTGCTTTCGACCCCTGGAAGTCCCCAGAGAACATCTCTCACTCA
GAACAGCTGAAGGAGAAGGAAAAGCAGGGATTCTTCCGCTCAATGAAGAAGAAGAAGAAGAAG
TCCCAGACCGTGCCCAACTCCGACAGCCCAGACCTGCTGACCCTGCAGAAGTCAATCCACTCT
GCCTCAACTCCTTCATCCAGACCCAAGGAGTGGCGCCCCGAAAAGATCTCCGACCTGCAGACT
CAGTCCCAGCCACTGAAGAGCCTGCGTAAGCTGCTGCACCTGAGCTCTGCTTCCAACCACCCT
GCCTCATCCGACCCACGTTTCCAGCCTCTGACTGCTCAGCAGACCAAGAACTCCTTCAGCGAG
ATCAGGATCCACCCACTGTCCCAGGCTAGCGGTGGCAGCTCTAACATCCGTCAGGAACCAGCT
CCTAAGGGACGTCCAGCTCTGCAGCTGCCTGGTCAGATGGACCCAGGCTGGCACGTGTCATCC
GTCACTAGATCAGCTACCGAGGGACCATCTTACTCAGAACAGCTGGGTGCCAAGTCAGGCCCC
AACGGACACCCATACAACCGCACCAACCGTTCCAGGATGCCTAACCTGAACGACCTGAAGGAG
ACTGCTCTGGGgGCCGGAGGTGGCGGATCCCTGGAAGTGCTTTTCCAAGGTCCcGACTACAAG
GACCACGACGGTGACTACAAAGATCACGACATCGACTACAAGGACGACGACGACAAGGACGGT
GCCCCACACCACCACCACCACCACTCTGCATGGTCGCATCCTCAATTCGAGAAGGGGGGTGGC
AGCGGAGGGGGTTCCGGCGGATCAGCCTGGAGTCACCCACAGTTTGAAAAATAA
```

The application's sequence listing, which the Patent Office published only in electronic form, follows.

SEQUENCE LISTING (177 sequences)

SEQ ID NO: 1 - protein, 960 aa, Artificial Sequence
  CDKL5107 isoform polypeptide 1-960 (full-length)
MKIPNIGNVMNKFEILGVVGEGAYGVVLKCRHKETHEIVAIKKFKDSEENEEVKETTLRELKMLRTLKQENIVELKEAFRRRGKLYLVFEYVEKNMLELLEEMPNGVPPEKVKSYIYQLIKAIHWCHKNDIVHRDIKPENLLISHNDVLKLCDFGFARNLSEGNNANYTEYVATRWYRSPELLLGAPYGKSVDMWSVGCILGELSDGQPLFPGESEIDQLFTIQKVLGPLPSEQMKLFYSNPRFHGLRFPAVNHPQSLERRYLGILNSVLLDLMKNLLKLDPADRYLTEQCLNHPTFQTQRLLDRSPSRSAKRKPYHVESSTLSNRNQAGKSTALQSHHRSNSKDIQNLSVGLPRADEGLPANESFLNGNLAGASLSPLHTKTYQASSQPGSTSKDLTNNNIPHLLSPKEAKSKTEFDFNIDPKPSEGPGTKYLKSNSRSQQNRHSFMESSQSKAGTLQPNEKQSRHSYIDTIPQSSRSPSYRTKAKSHGALSDSKSVSNLSEARAQIAEPSTSRYFPSSCLDLNSPTSPTPTRHSDTRTLLSPSGRNNRNEGTLDSRRTTTRHSKTMEELKLPEHMDSSHSHSLSAPHESFSYGLGYTSPFSSQQRPHRHSMYVTRDKVRAKGLDGSLSIGQGMAARANSLQLLSPQPGEQLPPEMTVARSSVKETSREGTSSFHTRQKSEGGVYHDPHSDDGTAPKENRHLYNDPVPRRVGSFYRVPSPRPDNSFHENNVSTRVSSLPSESSSGTNHSKRQPAFDPWKSPENISHSEQLKEKEKQGFFRSMKKKKKKSQTVPNSDSPDLLTLQKSIHSASTPSSRPKEWRPEKISDLQTQSQPLKSLRKLLHLSSASNHPASSDPRFQPLTAQQTKNSFSEIRIHPLSQASGGSSNIRQEPAPKGRPALQLPGQMDPGWHVSSVTRSATEGPSYSEQLGAKSGPNGHPYNRTNRSRMPNLNDLKETAL

SEQ ID NO: 2 - protein, 852 aa, Artificial Sequence
  CDKL5107 Variant delta 853-960
MKIPNIGNVMNKFEILGVVGEGAYGVVLKCRHKETHEIVAIKKFKDSEENEEVKETTLRELKMLRTLKQENIVELKEAFRRRGKLYLVFEYVEKNMLELLEEMPNGVPPEKVKSYIYQLIKAIHWCHKNDIVHRDIKPENLLISHNDVLKLCDFGFARNLSEGNNANYTEYVATRWYRSPELLLGAPYGKSVDMWSVGCILGELSDGQPLFPGESEIDQLFTIQKVLGPLPSEQMKLFYSNPRFHGLRFPAVNHPQSLERRYLGILNSVLLDLMKNLLKLDPADRYLTEQCLNHPTFQTQRLLDRSPSRSAKRKPYHVESSTLSNRNQAGKSTALQSHHRSNSKDIQNLSVGLPRADEGLPANESFLNGNLAGASLSPLHTKTYQASSQPGSTSKDLTNNNIPHLLSPKEAKSKTEFDFNIDPKPSEGPGTKYLKSNSRSQQNRHSFMESSQSKAGTLQPNEKQSRHSYIDTIPQSSRSPSYRTKAKSHGALSDSKSVSNLSEARAQIAEPSTSRYFPSSCLDLNSPTSPTPTRHSDTRTLLSPSGRNNRNEGTLDSRRTTTRHSKTMEELKLPEHMDSSHSHSLSAPHESFSYGLGYTSPFSSQQRPHRHSMYVTRDKVRAKGLDGSLSIGQGMAARANSLQLLSPQPGEQLPPEMTVARSSVKETSREGTSSFHTRQKSEGGVYHDPHSDDGTAPKENRHLYNDPVPRRVGSFYRVPSPRPDNSFHENNVSTRVSSLPSESSSGTNHSKRQPAFDPWKSPENISHSEQLKEKEKQGFFRSMKKKKKKSQTVPNSDSPDLLTLQKSIHSASTPSSRPKEWRPEKISDLQTQSQPLKSLRKLLHLSSASNHP

SEQ ID NO: 3 - protein, 744 aa, Artificial Sequence
  CDKL5107 Variant delta745-960
MKIPNIGNVMNKFEILGVVGEGAYGVVLKCRHKETHEIVAIKKFKDSEENEEVKETTLRELKMLRTLKQENIVELKEAFRRRGKLYLVFEYVEKNMLELLEEMPNGVPPEKVKSYIYQLIKAIHWCHKNDIVHRDIKPENLLISHNDVLKLCDFGFARNLSEGNNANYTEYVATRWYRSPELLLGAPYGKSVDMWSVGCILGELSDGQPLFPGESEIDQLFTIQKVLGPLPSEQMKLFYSNPRFHGLRFPAVNHPQSLERRYLGILNSVLLDLMKNLLKLDPADRYLTEQCLNHPTFQTQRLLDRSPSRSAKRKPYHVESSTLSNRNQAGKSTALQSHHRSNSKDIQNLSVGLPRADEGLPANESFLNGNLAGASLSPLHTKTYQASSQPGSTSKDLTNNNIPHLLSPKEAKSKTEFDFNIDPKPSEGPGTKYLKSNSRSQQNRHSFMESSQSKAGTLQPNEKQSRHSYIDTIPQSSRSPSYRTKAKSHGALSDSKSVSNLSEARAQIAEPSTSRYFPSSCLDLNSPTSPTPTRHSDTRTLLSPSGRNNRNEGTLDSRRTTTRHSKTMEELKLPEHMDSSHSHSLSAPHESFSYGLGYTSPFSSQQRPHRHSMYVTRDKVRAKGLDGSLSIGQGMAARANSLQLLSPQPGEQLPPEMTVARSSVKETSREGTSSFHTRQKSEGGVYHDPHSDDGTAPKENRHLYNDPVPRRVGSFYRVPSPRPDNSFHENNVSTRVSSLPSESS

SEQ ID NO: 4 - protein, 636 aa, Artificial Sequence
  CDKL5107 Variant delta637-960
MKIPNIGNVMNKFEILGVVGEGAYGVVLKCRHKETHEIVAIKKFKDSEENEEVKETTLRELKMLRTLKQENIVELKEAFRRRGKLYLVFEYVEKNMLELLEEMPNGVPPEKVKSYIYQLIKAIHWCHKNDIVHRDIKPENLLISHNDVLKLCDFGFARNLSEGNNANYTEYVATRWYRSPELLLGAPYGKSVDMWSVGCILGELSDGQPLFPGESEIDQLFTIQKVLGPLPSEQMKLFYSNPRFHGLRFPAVNHPQSLERRYLGILNSVLLDLMKNLLKLDPADRYLTEQCLNHPTFQTQRLLDRSPSRSAKRKPYHVESSTLSNRNQAGKSTALQSHHRSNSKDIQNLSVGLPRADEGLPANESFLNGNLAGASLSPLHTKTYQASSQPGSTSKDLTNNNIPHLLSPKEAKSKTEFDFNIDPKPSEGPGTKYLKSNSRSQQNRHSFMESSQSKAGTLQPNEKQSRHSYIDTIPQSSRSPSYRTKAKSHGALSDSKSVSNLSEARAQIAEPSTSRYFPSSCLDLNSPTSPTPTRHSDTRTLLSPSGRNNRNEGTLDSRRTTTRHSKTMEELKLPEHMDSSHSHSLSAPHESFSYGLGYTSPFSSQQRPHRHSMYVTRDKVRAKGLDGSLSIGQGMA

SEQ ID NO: 5 - protein, 528 aa, Artificial Sequence
  CDKL5107 Variant delta529-960
MKIPNIGNVMNKFEILGVVGEGAYGVVLKCRHKETHEIVAIKKFKDSEENEEVKETTLRELKMLRTLKQENIVELKEAFRRRGKLYLVFEYVEKNMLELLEEMPNGVPPEKVKSYIYQLIKAIHWCHKNDIVHRDIKPENLLISHNDVLKLCDFGFARNLSEGNNANYTEYVATRWYRSPELLLGAPYGKSVDMWSVGCILGELSDGQPLFPGESEIDQLFTIQKVLGPLPSEQMKLFYSNPRFHGLRFPAVNHPQSLERRYLGILNSVLLDLMKNLLKLDPADRYLTEQCLNHPTFQTQRLLDRSPSRSAKRKPYHVESSTLSNRNQAGKSTALQSHHRSNSKDIQNLSVGLPRADEGLPANESFLNGNLAGASLSPLHTKTYQASSQPGSTSKDLTNNNIPHLLSPKEAKSKTEFDFNIDPKPSEGPGTKYLKSNSRSQQNRHSFMESSQSKAGTLQPNEKQSRHSYIDTIPQSSRSPSYRTKAKSHGALSDSKSVSNLSEARAQIAEPSTSRYFPSSCLDLNSPT

SEQ ID NO: 6 - protein, 420 aa, Artificial Sequence
  CDKL5107 Variant delta421-960
MKIPNIGNVMNKFEILGVVGEGAYGVVLKCRHKETHEIVAIKKFKDSEENEEVKETTLRELKMLRTLKQENIVELKEAFRRRGKLYLVFEYVEKNMLELLEEMPNGVPPEKVKSYIYQLIKAIHWCHKNDIVHRDIKPENLLISHNDVLKLCDFGFARNLSEGNNANYTEYVATRWYRSPELLLGAPYGKSVDMWSVGCILGELSDGQPLFPGESEIDQLFTIQKVLGPLPSEQMKLFYSNPRFHGLRFPAVNHPQSLERRYLGILNSVLLDLMKNLLKLDPADRYLTEQCLNHPTFQTQRLLDRSPSRSAKRKPYHVESSTLSNRNQAGKSTALQSHHRSNSKDIQNLSVGLPRADEGLPANESFLNGNLAGASLSPLHTKTYQASSQPGSTSKDLTNNNIPHLLSPKEAKSKTEFDFN

SEQ ID NO: 7 - protein, 314 aa, Artificial Sequence
  CDKL5107 Variant delta315-960
MKIPNIGNVMNKFEILGVVGEGAYGVVLKCRHKETHEIVAIKKFKDSEENEEVKETTLRELKMLRTLKQENIVELKEAFRRRGKLYLVFEYVEKNMLELLEEMPNGVPPEKVKSYIYQLIKAIHWCHKNDIVHRDIKPENLLISHNDVLKLCDFGFARNLSEGNNANYTEYVATRWYRSPELLLGAPYGKSVDMWSVGCILGELSDGQPLFPGESEIDQLFTIQKVLGPLPSEQMKLFYSNPRFHGLRFPAVNHPQSLERRYLGILNSVLLDLMKNLLKLDPADRYLTEQCLNHPTFQTQRLLDRSPSRSAKRK

SEQ ID NO: 8 - protein, 854 aa, Artificial Sequence
  CDKL5107 Variant delta315-420
MKIPNIGNVMNKFEILGVVGEGAYGVVLKCRHKETHEIVAIKKFKDSEENEEVKETTLRELKMLRTLKQENIVELKEAFRRRGKLYLVFEYVEKNMLELLEEMPNGVPPEKVKSYIYQLIKAIHWCHKNDIVHRDIKPENLLISHNDVLKLCDFGFARNLSEGNNANYTEYVATRWYRSPELLLGAPYGKSVDMWSVGCILGELSDGQPLFPGESEIDQLFTIQKVLGPLPSEQMKLFYSNPRFHGLRFPAVNHPQSLERRYLGILNSVLLDLMKNLLKLDPADRYLTEQCLNHPTFQTQRLLDRSPSRSAKRKIDPKPSEGPGTKYLKSNSRSQQNRHSFMESSQSKAGTLQPNEKQSRHSYIDTIPQSSRSPSYRTKAKSHGALSDSKSVSNLSEARAQIAEPSTSRYFPSSCLDLNSPTSPTPTRHSDTRTLLSPSGRNNRNEGTLDSRRTTTRHSKTMEELKLPEHMDSSHSHSLSAPHESFSYGLGYTSPFSSQQRPHRHSMYVTRDKVRAKGLDGSLSIGQGMAARANSLQLLSPQPGEQLPPEMTVARSSVKETSREGTSSFHTRQKSEGGVYHDPHSDDGTAPKENRHLYNDPVPRRVGSFYRVPSPRPDNSFHENNVSTRVSSLPSESSSGTNHSKRQPAFDPWKSPENISHSEQLKEKEKQGFFRSMKKKKKKSQTVPNSDSPDLLTLQKSIHSASTPSSRPKEWRPEKISDLQTQSQPLKSLRKLLHLSSASNHPASSDPRFQPLTAQQTKNSFSEIRIHPLSQASGGSSNIRQEPAPKGRPALQLPGQMDPGWHVSSVTRSATEGPSYSEQLGAKSGPNGHPYNRTNRSRMPNLNDLKETAL

SEQ ID NO: 9 - protein, 746 aa, Artificial Sequence
  CDKL5107 Variant delta315-528
MKIPNIGNVMNKFEILGVVGEGAYGVVLKCRHKETHEIVAIKKFKDSEENEEVKETTLRELKMLRTLKQENIVELKEAFRRRGKLYLVFEYVEKNMLELLEEMPNGVPPEKVKSYIYQLIKAIHWCHKNDIVHRDIKPENLLISHNDVLKLCDFGFARNLSEGNNANYTEYVATRWYRSPELLLGAPYGKSVDMWSVGCILGELSDGQPLFPGESEIDQLFTIQKVLGPLPSEQMKLFYSNPRFHGLRFPAVNHPQSLERRYLGILNSVLLDLMKNLLKLDPADRYLTEQCLNHPTFQTQRLLDRSPSRSAKRKSPTPTRHSDTRTLLSPSGRNNRNEGTLDSRRTTTRHSKTMEELKLPEHMDSSHSHSLSAPHESFSYGLGYTSPFSSQQRPHRHSMYVTRDKVRAKGLDGSLSIGQGMAARANSLQLLSPQPGEQLPPEMTVARSSVKETSREGTSSFHTRQKSEGGVYHDPHSDDGTAPKENRHLYNDPVPRRVGSFYRVPSPRPDNSFHENNVSTRVSSLPSESSSGTNHSKRQPAFDPWKSPENISHSEQLKEKEKQGFFRSMKKKKKKSQTVPNSDSPDLLTLQKSIHSASTPSSRPKEWRPEKISDLQTQSQPLKSLRKLLHLSSASNHPASSDPRFQPLTAQQTKNSFSEIRIHPLSQASGGSSNIRQEPAPKGRPALQLPGQMDPGWHVSSVTRSATEGPSYSEQLGAKSGPNGHPYNRTNRSRMPNLNDLKETAL

SEQ ID NO: 10 - protein, 638 aa, Artificial Sequence
  CDKL5107 Variant delta315-636
MKIPNIGNVMNKFEILGVVGEGAYGVVLKCRHKETHEIVAIKKFKDSEENEEVKETTLRELKMLRTLKQENIVELKEAFRRRGKLYLVFEYVEKNMLELLEEMPNGVPPEKVKSYIYQLIKAIHWCHKNDIVHRDIKPENLLISHNDVLKLCDFGFARNLSEGNNANYTEYVATRWYRSPELLLGAPYGKSVDMWSVGCILGELSDGQPLFPGESEIDQLFTIQKVLGPLPSEQMKLFYSNPRFHGLRFPAVNHPQSLERRYLGILNSVLLDLMKNLLKLDPADRYLTEQCLNHPTFQTQRLLDRSPSRSAKRKARANSLQLLSPQPGEQLPPEMTVARSSVKETSREGTSSFHTRQKSEGGVYHDPHSDDGTAPKENRHLYNDPVPRRVGSFYRVPSPRPDNSFHENNVSTRVSSLPSESSSGTNHSKRQPAFDPWKSPENISHSEQLKEKEKQGFFRSMKKKKKKSQTVPNSDSPDLLTLQKSIHSASTPSSRPKEWRPEKISDLQTQSQPLKSLRKLLHLSSASNHPASSDPRFQPLTAQQTKNSFSEIRIHPLSQASGGSSNIRQEPAPKGRPALQLPGQMDPGWHVSSVTRSATEGPSYSEQLGAKSGPNGHPYNRTNRSRMPNLNDLKETAL

SEQ ID NO: 11 - protein, 530 aa, Artificial Sequence
  CDKL5107 Variant delta315-744
MKIPNIGNVMNKFEILGVVGEGAYGVVLKCRHKETHEIVAIKKFKDSEENEEVKETTLRELKMLRTLKQENIVELKEAFRRRGKLYLVFEYVEKNMLELLEEMPNGVPPEKVKSYIYQLIKAIHWCHKNDIVHRDIKPENLLISHNDVLKLCDFGFARNLSEGNNANYTEYVATRWYRSPELLLGAPYGKSVDMWSVGCILGELSDGQPLFPGESEIDQLFTIQKVLGPLPSEQMKLFYSNPRFHGLRFPAVNHPQSLERRYLGILNSVLLDLMKNLLKLDPADRYLTEQCLNHPTFQTQRLLDRSPSRSAKRKSGTNHSKRQPAFDPWKSPENISHSEQLKEKEKQGFFRSMKKKKKKSQTVPNSDSPDLLTLQKSIHSASTPSSRPKEWRPEKISDLQTQSQPLKSLRKLLHLSSASNHPASSDPRFQPLTAQQTKNSFSEIRIHPLSQASGGSSNIRQEPAPKGRPALQLPGQMDPGWHVSSVTRSATEGPSYSEQLGAKSGPNGHPYNRTNRSRMPNLNDLKETAL

SEQ ID NO: 12 - protein, 422 aa, Artificial Sequence
  CDKL5107 Variant delta315-852
MKIPNIGNVMNKFEILGVVGEGAYGVVLKCRHKETHEIVAIKKFKDSEENEEVKETTLRELKMLRTLKQENIVELKEAFRRRGKLYLVFEYVEKNMLELLEEMPNGVPPEKVKSYIYQLIKAIHWCHKNDIVHRDIKPENLLISHNDVLKLCDFGFARNLSEGNNANYTEYVATRWYRSPELLLGAPYGKSVDMWSVGCILGELSDGQPLFPGESEIDQLFTIQKVLGPLPSEQMKLFYSNPRFHGLRFPAVNHPQSLERRYLGILNSVLLDLMKNLLKLDPADRYLTEQCLNHPTFQTQRLLDRSPSRSAKRKASSDPRFQPLTAQQTKNSFSEIRIHPLSQASGGSSNIRQEPAPKGRPALQLPGQMDPGWHVSSVTRSATEGPSYSEQLGAKSGPNGHPYNRTNRSRMPNLNDLKETAL

SEQ ID NO: 13 - protein, 960 aa, Artificial Sequence
  CDKL5107 Variant 1-7NQ
MKIPNIGNVMNKFEILGVVGEGAYGVVLKCRHKETHEIVAIKKFKDSEENEEVKETTLRELKMLRTLKQENIVELKEAFRRRGKLYLVFEYVEKNMLELLEEMPNGVPPEKVKSYIYQLIKAIHWCHKNDIVHRDIKPENLLISHNDVLKLCDFGFARQLSEGNNAQYTEYVATRWYRSPELLLGAPYGKSVDMWSVGCILGELSDGQPLFPGESEIDQLFTIQKVLGPLPSEQMKLFYSNPRFHGLRFPAVNHPQSLERRYLGILNSVLLDLMKNLLKLDPADRYLTEQCLNHPTFQTQRLLDRSPSRSAKRKPYHVESSTLSNRNQAGKSTALQSHHRSNSKDIQQLSVGLPRADEGLPANESFLNGNLAGASLSPLHTKTYQASSQPGSTSKDLTNNNIPHLLSPKEAKSKTEFDFNIDPKPSEGPGTKYLKSNSRSQQNRHSFMESSQSKAGTLQPNEKQSRHSYIDTIPQSSRSPSYRTKAKSHGALSDSKSVSQLSEARAQIAEPSTSRYFPSSCLDLNSPTSPTPTRHSDTRTLLSPSGRNNRNEGTLDSRRTTTRHSKTMEELKLPEHMDSSHSHSLSAPHESFSYGLGYTSPFSSQQRPHRHSMYVTRDKVRAKGLDGSLSIGQGMAARANSLQLLSPQPGEQLPPEMTVARSSVKETSREGTSSFHTRQKSEGGVYHDPHSDDGTAPKENRHLYNDPVPRRVGSFYRVPSPRPDNSFHENNVSTRVSSLPSESSSGTNHSKRQPAFDPWKSPEQISHSEQLKEKEKQGFFRSMKKKKKKSQTVPNSDSPDLLTLQKSIHSASTPSSRPKEWRPEKISDLQTQSQPLKSLRKLLHLSSASNHPASSDPRFQPLTAQQTKNSFSEIRIHPLSQASGGSSNIRQEPAPKGRPALQLPGQMDPGWHVSSVTRSATEGPSYSEQLGAKSGPNGHPYQRTQRSRMPNLNDLKETAL

SEQ ID NO: 14 - protein, 960 aa, Artificial Sequence
  CDKL5107 Variant 2-7NQ
MKIPNIGNVMNKFEILGVVGEGAYGVVLKCRHKETHEIVAIKKFKDSEENEEVKETTLRELKMLRTLKQENIVELKEAFRRRGKLYLVFEYVEKNMLELLEEMPNGVPPEKVKSYIYQLIKAIHWCHKNDIVHRDIKPENLLISHNDVLKLCDFGFARNLSEGNNAQYTEYVATRWYRSPELLLGAPYGKSVDMWSVGCILGELSDGQPLFPGESEIDQLFTIQKVLGPLPSEQMKLFYSNPRFHGLRFPAVNHPQSLERRYLGILNSVLLDLMKNLLKLDPADRYLTEQCLNHPTFQTQRLLDRSPSRSAKRKPYHVESSTLSNRNQAGKSTALQSHHRSNSKDIQQLSVGLPRADEGLPANESFLNGNLAGASLSPLHTKTYQASSQPGSTSKDLTNNNIPHLLSPKEAKSKTEFDFNIDPKPSEGPGTKYLKSNSRSQQNRHSFMESSQSKAGTLQPNEKQSRHSYIDTIPQSSRSPSYRTKAKSHGALSDSKSVSQLSEARAQIAEPSTSRYFPSSCLDLNSPTSPTPTRHSDTRTLLSPSGRNNRNEGTLDSRRTTTRHSKTMEELKLPEHMDSSHSHSLSAPHESFSYGLGYTSPFSSQQRPHRHSMYVTRDKVRAKGLDGSLSIGQGMAARANSLQLLSPQPGEQLPPEMTVARSSVKETSREGTSSFHTRQKSEGGVYHDPHSDDGTAPKENRHLYNDPVPRRVGSFYRVPSPRPDNSFHENNVSTRVSSLPSESSSGTNHSKRQPAFDPWKSPEQISHSEQLKEKEKQGFFRSMKKKKKKSQTVPNSDSPDLLTLQKSIHSASTPSSRPKEWRPEKISDLQTQSQPLKSLRKLLHLSSASNHPASSDPRFQPLTAQQTKNSFSEIRIHPLSQASGGSSNIRQEPAPKGRPALQLPGQMDPGWHVSSVTRSATEGPSYSEQLGAKSGPNGHPYQRTQRSRMPNLNDLKETAL

SEQ ID NO: 15 - protein, 960 aa, Artificial Sequence
  CDKL5107 Variant 1,3-7NQ
MKIPNIGNVMNKFEILGVVGEGAYGVVLKCRHKETHEIVAIKKFKDSEENEEVKETTLRELKMLRTLKQENIVELKEAFRRRGKLYLVFEYVEKNMLELLEEMPNGVPPEKVKSYIYQLIKAIHWCHKNDIVHRDIKPENLLISHNDVLKLCDFGFARQLSEGNNANYTEYVATRWYRSPELLLGAPYGKSVDMWSVGCILGELSDGQPLFPGESEIDQLFTIQKVLGPLPSEQMKLFYSNPRFHGLRFPAVNHPQSLERRYLGILNSVLLDLMKNLLKLDPADRYLTEQCLNHPTFQTQRLLDRSPSRSAKRKPYHVESSTLSNRNQAGKSTALQSHHRSNSKDIQQLSVGLPRADEGLPANESFLNGNLAGASLSPLHTKTYQASSQPGSTSKDLTNNNIPHLLSPKEAKSKTEFDFNIDPKPSEGPGTKYLKSNSRSQQNRHSFMESSQSKAGTLQPNEKQSRHSYIDTIPQSSRSPSYRTKAKSHGALSDSKSVSQLSEARAQIAEPSTSRYFPSSCLDLNSPTSPTPTRHSDTRTLLSPSGRNNRNEGTLDSRRTTTRHSKTMEELKLPEHMDSSHSHSLSAPHESFSYGLGYTSPFSSQQRPHRHSMYVTRDKVRAKGLDGSLSIGQGMAARANSLQLLSPQPGEQLPPEMTVARSSVKETSREGTSSFHTRQKSEGGVYHDPHSDDGTAPKENRHLYNDPVPRRVGSFYRVPSPRPDNSFHENNVSTRVSSLPSESSSGTNHSKRQPAFDPWKSPEQISHSEQLKEKEKQGFFRSMKKKKKKSQTVPNSDSPDLLTLQKSIHSASTPSSRPKEWRPEKISDLQTQSQPLKSLRKLLHLSSASNHPASSDPRFQPLTAQQTKNSFSEIRIHPLSQASGGSSNIRQEPAPKGRPALQLPGQMDPGWHVSSVTRSATEGPSYSEQLGAKSGPNGHPYQRTQRSRMPNLNDLKETAL

SEQ ID NO: 16 - protein, 960 aa, Artificial Sequence
  CDKL5107 Variant 1-2,4-7NQ
MKIPNIGNVMNKFEILGVVGEGAYGVVLKCRHKETHEIVAIKKFKDSEENEEVKETTLRELKMLRTLKQENIVELKEAFRRRGKLYLVFEYVEKNMLELLEEMPNGVPPEKVKSYIYQLIKAIHWCHKNDIVHRDIKPENLLISHNDVLKLCDFGFARQLSEGNNAQYTEYVATRWYRSPELLLGAPYGKSVDMWSVGCILGELSDGQPLFPGESEIDQLFTIQKVLGPLPSEQMKLFYSNPRFHGLRFPAVNHPQSLERRYLGILNSVLLDLMKNLLKLDPADRYLTEQCLNHPTFQTQRLLDRSPSRSAKRKPYHVESSTLSNRNQAGKSTALQSHHRSNSKDIQNLSVGLPRADEGLPANESFLNGNLAGASLSPLHTKTYQASSQPGSTSKDLTNNNIPHLLSPKEAKSKTEFDFNIDPKPSEGPGTKYLKSNSRSQQNRHSFMESSQSKAGTLQPNEKQSRHSYIDTIPQSSRSPSYRTKAKSHGALSDSKSVSQLSEARAQIAEPSTSRYFPSSCLDLNSPTSPTPTRHSDTRTLLSPSGRNNRNEGTLDSRRTTTRHSKTMEELKLPEHMDSSHSHSLSAPHESFSYGLGYTSPFSSQQRPHRHSMYVTRDKVRAKGLDGSLSIGQGMAARANSLQLLSPQPGEQLPPEMTVARSSVKETSREGTSSFHTRQKSEGGVYHDPHSDDGTAPKENRHLYNDPVPRRVGSFYRVPSPRPDNSFHENNVSTRVSSLPSESSSGTNHSKRQPAFDPWKSPEQISHSEQLKEKEKQGFFRSMKKKKKKSQTVPNSDSPDLLTLQKSIHSASTPSSRPKEWRPEKISDLQTQSQPLKSLRKLLHLSSASNHPASSDPRFQPLTAQQTKNSFSEIRIHPLSQASGGSSNIRQEPAPKGRPALQLPGQMDPGWHVSSVTRSATEGPSYSEQLGAKSGPNGHPYQRTQRSRMPNLNDLKETAL

SEQ ID NO: 17 - protein, 960 aa, Artificial Sequence
  CDKL5107 Variant 1-3,5-7NQ
MKIPNIGNVMNKFEILGVVGEGAYGVVLKCRHKETHEIVAIKKFKDSEENEEVKETTLRELKMLRTLKQENIVELKEAFRRRGKLYLVFEYVEKNMLELLEEMPNGVPPEKVKSYIYQLIKAIHWCHKNDIVHRDIKPENLLISHNDVLKLCDFGFARQLSEGNNAQYTEYVATRWYRSPELLLGAPYGKSVDMWSVGCILGELSDGQPLFPGESEIDQLFTIQKVLGPLPSEQMKLFYSNPRFHGLRFPAVNHPQSLERRYLGILNSVLLDLMKNLLKLDPADRYLTEQCLNHPTFQTQRLLDRSPSRSAKRKPYHVESSTLSNRNQAGKSTALQSHHRSNSKDIQQLSVGLPRADEGLPANESFLNGNLAGASLSPLHTKTYQASSQPGSTSKDLTNNNIPHLLSPKEAKSKTEFDFNIDPKPSEGPGTKYLKSNSRSQQNRHSFMESSQSKAGTLQPNEKQSRHSYIDTIPQSSRSPSYRTKAKSHGALSDSKSVSNLSEARAQIAEPSTSRYFPSSCLDLNSPTSPTPTRHSDTRTLLSPSGRNNRNEGTLDSRRTTTRHSKTMEELKLPEHMDSSHSHSLSAPHESFSYGLGYTSPFSSQQRPHRHSMYVTRDKVRAKGLDGSLSIGQGMAARANSLQLLSPQPGEQLPPEMTVARSSVKETSREGTSSFHTRQKSEGGVYHDPHSDDGTAPKENRHLYNDPVPRRVGSFYRVPSPRPDNSFHENNVSTRVSSLPSESSSGTNHSKRQPAFDPWKSPEQISHSEQLKEKEKQGFFRSMKKKKKKSQTVPNSDSPDLLTLQKSIHSASTPSSRPKEWRPEKISDLQTQSQPLKSLRKLLHLSSASNHPASSDPRFQPLTAQQTKNSFSEIRIHPLSQASGGSSNIRQEPAPKGRPALQLPGQMDPGWHVSSVTRSATEGPSYSEQLGAKSGPNGHPYQRTQRSRMPNLNDLKETAL

SEQ ID NO: 18 - protein, 960 aa, Artificial Sequence
  CDKL5107 Variant 1-4,6-7NQ
MKIPNIGNVMNKFEILGVVGEGAYGVVLKCRHKETHEIVAIKKFKDSEENEEVKETTLRELKMLRTLKQENIVELKEAFRRRGKLYLVFEYVEKNMLELLEEMPNGVPPEKVKSYIYQLIKAIHWCHKNDIVHRDIKPENLLISHNDVLKLCDFGFARQLSEGNNAQYTEYVATRWYRSPELLLGAPYGKSVDMWSVGCILGELSDGQPLFPGESEIDQLFTIQKVLGPLPSEQMKLFYSNPRFHGLRFPAVNHPQSLERRYLGILNSVLLDLMKNLLKLDPADRYLTEQCLNHPTFQTQRLLDRSPSRSAKRKPYHVESSTLSNRNQAGKSTALQSHHRSNSKDIQQLSVGLPRADEGLPANESFLNGNLAGASLSPLHTKTYQASSQPGSTSKDLTNNNIPHLLSPKEAKSKTEFDFNIDPKPSEGPGTKYLKSNSRSQQNRHSFMESSQSKAGTLQPNEKQSRHSYIDTIPQSSRSPSYRTKAKSHGALSDSKSVSQLSEARAQIAEPSTSRYFPSSCLDLNSPTSPTPTRHSDTRTLLSPSGRNNRNEGTLDSRRTTTRHSKTMEELKLPEHMDSSHSHSLSAPHESFSYGLGYTSPFSSQQRPHRHSMYVTRDKVRAKGLDGSLSIGQGMAARANSLQLLSPQPGEQLPPEMTVARSSVKETSREGTSSFHTRQKSEGGVYHDPHSDDGTAPKENRHLYNDPVPRRVGSFYRVPSPRPDNSFHENNVSTRVSSLPSESSSGTNHSKRQPAFDPWKSPENISHSEQLKEKEKQGFFRSMKKKKKKSQTVPNSDSPDLLTLQKSIHSASTPSSRPKEWRPEKISDLQTQSQPLKSLRKLLHLSSASNHPASSDPRFQPLTAQQTKNSFSEIRIHPLSQASGGSSNIRQEPAPKGRPALQLPGQMDPGWHVSSVTRSATEGPSYSEQLGAKSGPNGHPYQRTQRSRMPNLNDLKETAL

SEQ ID NO: 19 - protein, 960 aa, Artificial Sequence
  CDKL5107 Variant 1-5,7NQ
MKIPNIGNVMNKFEILGVVGEGAYGVVLKCRHKETHEIVAIKKFKDSEENEEVKETTLRELKMLRTLKQENIVELKEAFRRRGKLYLVFEYVEKNMLELLEEMPNGVPPEKVKSYIYQLIKAIHWCHKNDIVHRDIKPENLLISHNDVLKLCDFGFARQLSEGNNAQYTEYVATRWYRSPELLLGAPYGKSVDMWSVGCILGELSDGQPLFPGESEIDQLFTIQKVLGPLPSEQMKLFYSNPRFHGLRFPAVNHPQSLERRYLGILNSVLLDLMKNLLKLDPADRYLTEQCLNHPTFQTQRLLDRSPSRSAKRKPYHVESSTLSNRNQAGKSTALQSHHRSNSKDIQQLSVGLPRADEGLPANESFLNGNLAGASLSPLHTKTYQASSQPGSTSKDLTNNNIPHLLSPKEAKSKTEFDFNIDPKPSEGPGTKYLKSNSRSQQNRHSFMESSQSKAGTLQPNEKQSRHSYIDTIPQSSRSPSYRTKAKSHGALSDSKSVSQLSEARAQIAEPSTSRYFPSSCLDLNSPTSPTPTRHSDTRTLLSPSGRNNRNEGTLDSRRTTTRHSKTMEELKLPEHMDSSHSHSLSAPHESFSYGLGYTSPFSSQQRPHRHSMYVTRDKVRAKGLDGSLSIGQGMAARANSLQLLSPQPGEQLPPEMTVARSSVKETSREGTSSFHTRQKSEGGVYHDPHSDDGTAPKENRHLYNDPVPRRVGSFYRVPSPRPDNSFHENNVSTRVSSLPSESSSGTNHSKRQPAFDPWKSPEQISHSEQLKEKEKQGFFRSMKKKKKKSQTVPNSDSPDLLTLQKSIHSASTPSSRPKEWRPEKISDLQTQSQPLKSLRKLLHLSSASNHPASSDPRFQPLTAQQTKNSFSEIRIHPLSQASGGSSNIRQEPAPKGRPALQLPGQMDPGWHVSSVTRSATEGPSYSEQLGAKSGPNGHPYNRTQRSRMPNLNDLKETAL

SEQ ID NO: 20 - protein, 960 aa, Artificial Sequence
  CDKL5107 Variant 1-6NQ
MKIPNIGNVMNKFEILGVVGEGAYGVVLKCRHKETHEIVAIKKFKDSEENEEVKETTLRELKMLRTLKQENIVELKEAFRRRGKLYLVFEYVEKNMLELLEEMPNGVPPEKVKSYIYQLIKAIHWCHKNDIVHRDIKPENLLISHNDVLKLCDFGFARQLSEGNNAQYTEYVATRWYRSPELLLGAPYGKSVDMWSVGCILGELSDGQPLFPGESEIDQLFTIQKVLGPLPSEQMKLFYSNPRFHGLRFPAVNHPQSLERRYLGILNSVLLDLMKNLLKLDPADRYLTEQCLNHPTFQTQRLLDRSPSRSAKRKPYHVESSTLSNRNQAGKSTALQSHHRSNSKDIQQLSVGLPRADEGLPANESFLNGNLAGASLSPLHTKTYQASSQPGSTSKDLTNNNIPHLLSPKEAKSKTEFDFNIDPKPSEGPGTKYLKSNSRSQQNRHSFMESSQSKAGTLQPNEKQSRHSYIDTIPQSSRSPSYRTKAKSHGALSDSKSVSQLSEARAQIAEPSTSRYFPSSCLDLNSPTSPTPTRHSDTRTLLSPSGRNNRNEGTLDSRRTTTRHSKTMEELKLPEHMDSSHSHSLSAPHESFSYGLGYTSPFSSQQRPHRHSMYVTRDKVRAKGLDGSLSIGQGMAARANSLQLLSPQPGEQLPPEMTVARSSVKETSREGTSSFHTRQKSEGGVYHDPHSDDGTAPKENRHLYNDPVPRRVGSFYRVPSPRPDNSFHENNVSTRVSSLPSESSSGTNHSKRQPAFDPWKSPEQISHSEQLKEKEKQGFFRSMKKKKKKSQTVPNSDSPDLLTLQKSIHSASTPSSRPKEWRPEKISDLQTQSQPLKSLRKLLHLSSASNHPASSDPRFQPLTAQQTKNSFSEIRIHPLSQASGGSSNIRQEPAPKGRPALQLPGQMDPGWHVSSVTRSATEGPSYSEQLGAKSGPNGHPYQRTNRSRMPNLNDLKETAL

SEQ ID NO: 21 - protein, 960 aa, Artificial Sequence
  CDKL5107 Variant 2NQ
MKIPNIGNVMNKFEILGVVGEGAYGVVLKCRHKETHEIVAIKKFKDSEENEEVKETTLRELKMLRTLKQENIVELKEAFRRRGKLYLVFEYVEKNMLELLEEMPNGVPPEKVKSYIYQLIKAIHWCHKNDIVHRDIKPENLLISHNDVLKLCDFGFARNLSEGNNAQYTEYVATRWYRSPELLLGAPYGKSVDMWSVGCILGELSDGQPLFPGESEIDQLFTIQKVLGPLPSEQMKLFYSNPRFHGLRFPAVNHPQSLERRYLGILNSVLLDLMKNLLKLDPADRYLTEQCLNHPTFQTQRLLDRSPSRSAKRKPYHVESSTLSNRNQAGKSTALQSHHRSNSKDIQNLSVGLPRADEGLPANESFLNGNLAGASLSPLHTKTYQASSQPGSTSKDLTNNNIPHLLSPKEAKSKTEFDFNIDPKPSEGPGTKYLKSNSRSQQNRHSFMESSQSKAGTLQPNEKQSRHSYIDTIPQSSRSPSYRTKAKSHGALSDSKSVSNLSEARAQIAEPSTSRYFPSSCLDLNSPTSPTPTRHSDTRTLLSPSGRNNRNEGTLDSRRTTTRHSKTMEELKLPEHMDSSHSHSLSAPHESFSYGLGYTSPFSSQQRPHRHSMYVTRDKVRAKGLDGSLSIGQGMAARANSLQLLSPQPGEQLPPEMTVARSSVKETSREGTSSFHTRQKSEGGVYHDPHSDDGTAPKENRHLYNDPVPRRVGSFYRVPSPRPDNSFHENNVSTRVSSLPSESSSGTNHSKRQPAFDPWKSPENISHSEQLKEKEKQGFFRSMKKKKKKSQTVPNSDSPDLLTLQKSIHSASTPSSRPKEWRPEKISDLQTQSQPLKSLRKLLHLSSASNHPASSDPRFQPLTAQQTKNSFSEIRIHPLSQASGGSSNIRQEPAPKGRPALQLPGQMDPGWHVSSVTRSATEGPSYSEQLGAKSGPNGHPYNRTNRSRMPNLNDLKETAL

SEQ ID NO: 22 - protein, 960 aa, Artificial Sequence
  CDKL5107 Variant 1-10NQ
MKIPNIGNVMNKFEILGVVGEGAYGVVLKCRHKETHEIVAIKKFKDSEENEEVKETTLRELKMLRTLKQENIVELKEAFRRRGKLYLVFEYVEKNMLELLEEMPNGVPPEKVKSYIYQLIKAIHWCHKNDIVHRDIKPENLLISHNDVLKLCDFGFARQLSEGNNAQYTEYVATRWYRSPELLLGAPYGKSVDMWSVGCILGELSDGQPLFPGESEIDQLFTIQKVLGPLPSEQMKLFYSNPRFHGLRFPAVNHPQSLERRYLGILNSVLLDLMKNLLKLDPADRYLTEQCLNHPTFQTQRLLDRSPSRSAKRKPYHVESSTLSNRNQAGKSTALQSHHRSNSKDIQQLSVGLPRADEGLPAQESFLNGNLAGASLSPLHTKTYQASSQPGSTSKDLTNNNIPHLLSPKEAKSKTEFDFNIDPKPSEGPGTKYLKSNSRSQQNRHSFMESSQSKAGTLQPNEKQSRHSYIDTIPQSSRSPSYRTKAKSHGALSDSKSVSQLSEARAQIAEPSTSRYFPSSCLDLNSPTSPTPTRHSDTRTLLSPSGRNNRNEGTLDSRRTTTRHSKTMEELKLPEHMDSSHSHSLSAPHESFSYGLGYTSPFSSQQRPHRHSMYVTRDKVRAKGLDGSLSIGQGMAARANSLQLLSPQPGEQLPPEMTVARSSVKETSREGTSSFHTRQKSEGGVYHDPHSDDGTAPKENRHLYNDPVPRRVGSFYRVPSPRPDNSFHENQVSTRVSSLPSESSSGTQHSKRQPAFDPWKSPEQISHSEQLKEKEKQGFFRSMKKKKKKSQTVPNSDSPDLLTLQKSIHSASTPSSRPKEWRPEKISDLQTQSQPLKSLRKLLHLSSASNHPASSDPRFQPLTAQQTKNSFSEIRIHPLSQASGGSSNIRQEPAPKGRPALQLPGQMDPGWHVSSVTRSATEGPSYSEQLGAKSGPNGHPYQRTQRSRMPNLNDLKETAL

SEQ ID NO: 23 - protein, 960 aa, Artificial Sequence
  CDKL5107 Variant 1-7, 9-10NQ
MKIPNIGNVMNKFEILGVVGEGAYGVVLKCRHKETHEIVAIKKFKDSEENEEVKETTLRELKMLRTLKQENIVELKEAFRRRGKLYLVFEYVEKNMLELLEEMPNGVPPEKVKSYIYQLIKAIHWCHKNDIVHRDIKPENLLISHNDVLKLCDFGFARQLSEGNNAQYTEYVATRWYRSPELLLGAPYGKSVDMWSVGCILGELSDGQPLFPGESEIDQLFTIQKVLGPLPSEQMKLFYSNPRFHGLRFPAVNHPQSLERRYLGILNSVLLDLMKNLLKLDPADRYLTEQCLNHPTFQTQRLLDRSPSRSAKRKPYHVESSTLSNRNQAGKSTALQSHHRSNSKDIQQLSVGLPRADEGLPANESFLNGNLAGASLSPLHTKTYQASSQPGSTSKDLTNNNIPHLLSPKEAKSKTEFDFNIDPKPSEGPGTKYLKSNSRSQQNRHSFMESSQSKAGTLQPNEKQSRHSYIDTIPQSSRSPSYRTKAKSHGALSDSKSVSQLSEARAQIAEPSTSRYFPSSCLDLNSPTSPTPTRHSDTRTLLSPSGRNNRNEGTLDSRRTTTRHSKTMEELKLPEHMDSSHSHSLSAPHESFSYGLGYTSPFSSQQRPHRHSMYVTRDKVRAKGLDGSLSIGQGMAARANSLQLLSPQPGEQLPPEMTVARSSVKETSREGTSSFHTRQKSEGGVYHDPHSDDGTAPKENRHLYNDPVPRRVGSFYRVPSPRPDNSFHENQVSTRVSSLPSESSSGTQHSKRQPAFDPWKSPEQISHSEQLKEKEKQGFFRSMKKKKKKSQTVPNSDSPDLLTLQKSIHSASTPSSRPKEWRPEKISDLQTQSQPLKSLRKLLHLSSASNHPASSDPRFQPLTAQQTKNSFSEIRIHPLSQASGGSSNIRQEPAPKGRPALQLPGQMDPGWHVSSVTRSATEGPSYSEQLGAKSGPNGHPYQRTQRSRMPNLNDLKETAL

SEQ ID NO: 24 - protein, 960 aa, Artificial Sequence
  CDKL5107 Variant 1-8, 10NQ
MKIPNIGNVMNKFEILGVVGEGAYGVVLKCRHKETHEIVAIKKFKDSEENEEVKETTLRELKMLRTLKQENIVELKEAFRRRGKLYLVFEYVEKNMLELLEEMPNGVPPEKVKSYIYQLIKAIHWCHKNDIVHRDIKPENLLISHNDVLKLCDFGFARQLSEGNNAQYTEYVATRWYRSPELLLGAPYGKSVDMWSVGCILGELSDGQPLFPGESEIDQLFTIQKVLGPLPSEQMKLFYSNPRFHGLRFPAVNHPQSLERRYLGILNSVLLDLMKNLLKLDPADRYLTEQCLNHPTFQTQRLLDRSPSRSAKRKPYHVESSTLSNRNQAGKSTALQSHHRSNSKDIQQLSVGLPRADEGLPAQESFLNGNLAGASLSPLHTKTYQASSQPGSTSKDLTNNNIPHLLSPKEAKSKTEFDFNIDPKPSEGPGTKYLKSNSRSQQNRHSFMESSQSKAGTLQPNEKQSRHSYIDTIPQSSRSPSYRTKAKSHGALSDSKSVSQLSEARAQIAEPSTSRYFPSSCLDLNSPTSPTPTRHSDTRTLLSPSGRNNRNEGTLDSRRTTTRHSKTMEELKLPEHMDSSHSHSLSAPHESFSYGLGYTSPFSSQQRPHRHSMYVTRDKVRAKGLDGSLSIGQGMAARANSLQLLSPQPGEQLPPEMTVARSSVKETSREGTSSFHTRQKSEGGVYHDPHSDDGTAPKENRHLYNDPVPRRVGSFYRVPSPRPDNSFHENNVSTRVSSLPSESSSGTQHSKRQPAFDPWKSPEQISHSEQLKEKEKQGFFRSMKKKKKKSQTVPNSDSPDLLTLQKSIHSASTPSSRPKEWRPEKISDLQTQSQPLKSLRKLLHLSSASNHPASSDPRFQPLTAQQTKNSFSEIRIHPLSQASGGSSNIRQEPAPKGRPALQLPGQMDPGWHVSSVTRSATEGPSYSEQLGAKSGPNGHPYQRTQRSRMPNLNDLKETAL

SEQ ID NO: 25 - protein, 960 aa, Artificial Sequence
  CDKL5107 Variant 1-9NQ
MKIPNIGNVMNKFEILGVVGEGAYGVVLKCRHKETHEIVAIKKFKDSEENEEVKETTLRELKMLRTLKQENIVELKEAFRRRGKLYLVFEYVEKNMLELLEEMPNGVPPEKVKSYIYQLIKAIHWCHKNDIVHRDIKPENLLISHNDVLKLCDFGFARQLSEGNNAQYTEYVATRWYRSPELLLGAPYGKSVDMWSVGCILGELSDGQPLFPGESEIDQLFTIQKVLGPLPSEQMKLFYSNPRFHGLRFPAVNHPQSLERRYLGILNSVLLDLMKNLLKLDPADRYLTEQCLNHPTFQTQRLLDRSPSRSAKRKPYHVESSTLSNRNQAGKSTALQSHHRSNSKDIQQLSVGLPRADEGLPAQESFLNGNLAGASLSPLHTKTYQASSQPGSTSKDLTNNNIPHLLSPKEAKSKTEFDFNIDPKPSEGPGTKYLKSNSRSQQNRHSFMESSQSKAGTLQPNEKQSRHSYIDTIPQSSRSPSYRTKAKSHGALSDSKSVSQLSEARAQIAEPSTSRYFPSSCLDLNSPTSPTPTRHSDTRTLLSPSGRNNRNEGTLDSRRTTTRHSKTMEELKLPEHMDSSHSHSLSAPHESFSYGLGYTSPFSSQQRPHRHSMYVTRDKVRAKGLDGSLSIGQGMAARANSLQLLSPQPGEQLPPEMTVARSSVKETSREGTSSFHTRQKSEGGVYHDPHSDDGTAPKENRHLYNDPVPRRVGSFYRVPSPRPDNSFHENQVSTRVSSLPSESSSGTNHSKRQPAFDPWKSPEQISHSEQLKEKEKQGFFRSMKKKKKKSQTVPNSDSPDLLTLQKSIHSASTPSSRPKEWRPEKISDLQTQSQPLKSLRKLLHLSSASNHPASSDPRFQPLTAQQTKNSFSEIRIHPLSQASGGSSNIRQEPAPKGRPALQLPGQMDPGWHVSSVTRSATEGPSYSEQLGAKSGPNGHPYQRTQRSRMPNLNDLKETAL

SEQ ID NO: 26 - protein, 1030 aa, Artificial Sequence
  CDKL5115 isoform polypeptide 1-1030 (full-length)
MKIPNIGNVMNKFEILGVVGEGAYGVVLKCRHKETHEIVAIKKFKDSEENEEVKETTLRELKMLRTLKQENIVELKEAFRRRGKLYLVFEYVEKNMLELLEEMPNGVPPEKVKSYIYQLIKAIHWCHKNDIVHRDIKPENLLISHNDVLKLCDFGFARNLSEGNNANYTEYVATRWYRSPELLLGAPYGKSVDMWSVGCILGELSDGQPLFPGESEIDQLFTIQKVLGPLPSEQMKLFYSNPRFHGLRFPAVNHPQSLERRYLGILNSVLLDLMKNLLKLDPADRYLTEQCLNHPTFQTQRLLDRSPSRSAKRKPYHVESSTLSNRNQAGKSTALQSHHRSNSKDIQNLSVGLPRADEGLPANESFLNGNLAGASLSPLHTKTYQASSQPGSTSKDLTNNNIPHLLSPKEAKSKTEFDFNIDPKPSEGPGTKYLKSNSRSQQNRHSFMESSQSKAGTLQPNEKQSRHSYIDTIPQSSRSPSYRTKAKSHGALSDSKSVSNLSEARAQIAEPSTSRYFPSSCLDLNSPTSPTPTRHSDTRTLLSPSGRNNRNEGTLDSRRTTTRHSKTMEELKLPEHMDSSHSHSLSAPHESFSYGLGYTSPFSSQQRPHRHSMYVTRDKVRAKGLDGSLSIGQGMAARANSLQLLSPQPGEQLPPEMTVARSSVKETSREGTSSFHTRQKSEGGVYHDPHSDDGTAPKENRHLYNDPVPRRVGSFYRVPSPRPDNSFHENNVSTRVSSLPSESSSGTNHSKRQPAFDPWKSPENISHSEQLKEKEKQGFFRSMKKKKKKSQTVPNSDSPDLLTLQKSIHSASTPSSRPKEWRPEKISDLQTQSQPLKSLRKLLHLSSASNHPASSDPRFQPLTAQQTKNSFSEIRIHPLSQASGGSSNIRQEPAPKGRPALQLPDGGCDGRRQRHHSGPQDRRFMLRTTEQQGEYFCCGDPKKPHTPCVPNRALHRPISSPAPYPVLQVRGTSMCPTLQVRGTDAFSCPTQQSGFSFFVRHVMREALIHRAQVNQAALLTYHENAALTGK

SEQ ID NO: 27 - DNA, 141 bp, Artificial Sequence
  AAV2 L-ITR
cctgcaggcagctgcgcgctcgctcgctcactgaggccgcccgggcaaagcccgggcgtcgggcgacctttggtcgcccggcctcagtgagcgagcgagcgcgcagagagggagtggccaactccatcactaggggttcct

SEQ ID NO: 28 - DNA, 141 bp, Artificial Sequence
  AAV2 R-ITR
aggaacccctagtgatggagttggccactccctctctgcgcgctcgctcgctcactgaggccgggcgaccaaaggtcgcccgacgcccgggctttgcccgggcggcctcagtgagcgagcgagcgcgcagctgcctgcagg

SEQ ID NO: 29 - DNA, 818 bp, Artificial Sequence
  CBh
ttaatagtaatcaattacggggtcattagttcatagcccatatatggagttccgcgttacataacttacggtaaatggcccgcctggctgaccgcccaacgacccccgcccattgacgtcaataatgacgtatgttcccatagtaacgccaatagggactttccattgacgtcaatgggtggagtatttacggtaaactgcccacttggcagtacatcaagtgtatcatatgccaagtacgccccctattgacgtcaatgacggtaaatggcccgcctggcattatgcccagtacatgaccttacgggactttcctacttggcagtacatctccacgttctgcttcactctccccatctcccccccctccccacccccaattttgtatttatttattttttaattattttgtgcagcgatgggggcggggggggggggggcgcgcgccaggcggggcggggcggggcgaggggcggggcggggcgaggcggagaggtgcggcggcagccaatcagagcggcgcgctccgaaagtttccttttatggcgaggcggcggcggcggcggccctataaaaagcgaagcgcgcggcggggagtcgctgcgttgccttcgccccgtgccccgctccgcgccgcctcgcgccgcccgccccggctctgactgaccgcgttactcccacaggtgagcgggcgggacggcccttctcctccgggctgtaattagcaagaggtaagggtttaagggatggttggttggtggggtattaatgtttaattacctgttttacaggcctgaaatcacttggttttaggttgg

SEQ ID NO: 30 - DNA, 572 bp, Artificial Sequence
  hSyn1
actacaaaccgagtatctgcagagggccctgcgtatgagtgcaagtgggttttaggaccaggatgaggcggggtgggggtgcctacctgacgaccgaccccgacccactggacaagcacccaacccccattccccaaattgcgcatcccctatcagagagggggaggggaaacaggatgcggcgaggcgcgtgcgcactgccagcttcagcaccgcggacagtgccttcgcccccgcctggcggcgcgcgccaccgccgcctcagcactgaaggcgcgctgacgtcactcgccggtcccccgcaaactccccttcccggccaccttggtcgcgtccgcgccgccgccggcccagccggaccgcaccacgcgaggcgcgagataggggggcacgggcgcgaccatctgcgctgcggcgccggcgactcagcgctgcctcagtctgcggtgggcagcggaggagtcgtgtcgtgcctgagagcgcagctgtgctcctgggcaccgcgcagtccgcccccgcggctcctggccagaccacccctaggaccccctgccccaagtcgcagccttcga

SEQ ID NO: 31 - protein, 27 aa, Artificial Sequence
  TAT28 CPP
DAAQPARRARRTKLAAYGRKKRRQRRR

SEQ ID NO: 32 - protein, 27 aa, Artificial Sequence
  TATkappa28 CPP
DAAQPARRARRTKLAAYARKAARQARA

SEQ ID NO: 33 - protein, 11 aa, Artificial Sequence
  TAT11 CPP
YGRKKRRQRRR

SEQ ID NO: 34 - protein, 11 aa, Artificial Sequence
  TATkappa11 CPP
YARKAARQARA

SEQ ID NO: 35 - protein, 21 aa, Artificial Sequence
  Transportan CPP
AGYLLGKINLKALAALAKKIL

SEQ ID NO: 36 - protein, 16 aa, Artificial Sequence
  Antennapedia CPP
RQIKIWFQNRRMKWKK

SEQ ID NO: 37 - protein, 12 aa, Artificial Sequence
  P97 CPP
DSSHAFTLDELR

SEQ ID NO: 38 - protein, 28 aa, Artificial Sequence
  MBiP
MKLSLVAAMLLLLSLVAAMLLLLSAARA

SEQ ID NO: 39 - protein, 25 aa, Artificial Sequence
  MBiP2
MKLSLVAAMLLLLWVALLLLSAARA

SEQ ID NO: 40 - protein, 26 aa, Artificial Sequence
  MBiP3
MKLSLVAAMLLLLSLVALLLLSAARA

SEQ ID NO: 41 - protein, 26 aa, Artificial Sequence
  MBiP4
MKLSLVAAMLLLLALVALLLLSAARA

SEQ ID NO: 42 - protein, 20 aa, Artificial Sequence
  Murine Igkappa
METDTLLLWVLLLWVPGSTG

SEQ ID NO: 43 - protein, 1064 aa, Artificial Sequence
  MBip_Tkappa28p_107_3xFlagHis_cho-opt in pOptiVec
MKLSLVAAMLLLLSLVAAMLLLLSAARAGDAAQPARRARRTKLAAYARKAARQARAGGGGSKIPNIGNVMNKFEILGVVGEGAYGVVLKCRHKETHEIVAIKKFKDSEENEEVKETTLRELKMLRTLKQENIVELKEAFRRRGKLYLVFEYVEKNMLELLEEMPNGVPPEKVKSYIYQLIKAIHWCHKNDIVHRDIKPENLLISHNDVLKLCDFGFARNLSEGNNANYTEYVATRWYRSPELLLGAPYGKSVDMWSVGCILGELSDGQPLFPGESEIDQLFTIQKVLGPLPSEQMKLFYSNPRFHGLRFPAVNHPQSLERRYLGILNSVLLDLMKNLLKLDPADRYLTEQCLNHPTFQTQRLLDRSPSRSAKRKPYHVESSTLSNRNQAGKSTALQSHHRSNSKDIQNLSVGLPRADEGLPANESFLNGNLAGASLSPLHTKTYQASSQPGSTSKDLTNNNIPHLLSPKEAKSKTEFDFNIDPKPSEGPGTKYLKSNSRSQQNRHSFMESSQSKAGTLQPNEKQSRHSYIDTIPQSSRSPSYRTKAKSHGALSDSKSVSNLSEARAQIAEPSTSRYFPSSCLDLNSPTSPTPTRHSDTRTLLSPSGRNNRNEGTLDSRRTTTRHSKTMEELKLPEHMDSSHSHSLSAPHESFSYGLGYTSPFSSQQRPHRHSMYVTRDKVRAKGLDGSLSIGQGMAARANSLQLLSPQPGEQLPPEMTVARSSVKETSREGTSSFHTRQKSEGGVYHDPHSDDGTAPKENRHLYNDPVPRRVGSFYRVPSPRPDNSFHENNVSTRVSSLPSESSSGTNHSKRQPAFDPWKSPENISHSEQLKEKEKQGFFRSMKKKKKKSQTVPNSDSPDLLTLQKSIHSASTPSSRPKEWRPEKISDLQTQSQPLKSLRKLLHLSSASNHPASSDPRFQPLTAQQTKNSFSEIRIHPLSQASGGSSNIRQEPAPKGRPALQLPGQMDPGWHVSSVTRSATEGPSYSEQLGAKSGPNGHPYNRTNRSRMPNLNDLKETALGGGGSENLYFQGDYKDHDGDYKDHDIDYKDDDDKDGAPHHHHHH

SEQ ID NO: 44 - protein, 1056 aa, Artificial Sequence
  Igkappa_Tkappa28p_107_3xFlagHis_cho-opt in pOptiVec
METDTLLLWVLLLWVPGSTGGDAAQPARRARRTKLAAYARKAARQARAGGGGSKIPNIGNVMNKFEILGVVGEGAYGVVLKCRHKETHEIVAIKKFKDSEENEEVKETTLRELKMLRTLKQENIVELKEAFRRRGKLYLVFEYVEKNMLELLEEMPNGVPPEKVKSYIYQLIKAIHWCHKNDIVHRDIKPENLLISHNDVLKLCDFGFARNLSEGNNANYTEYVATRWYRSPELLLGAPYGKSVDMWSVGCILGELSDGQPLFPGESEIDQLFTIQKVLGPLPSEQMKLFYSNPRFHGLRFPAVNHPQSLERRYLGILNSVLLDLMKNLLKLDPADRYLTEQCLNHPTFQTQRLLDRSPSRSAKRKPYHVESSTLSNRNQAGKSTALQSHHRSNSKDIQNLSVGLPRADEGLPANESFLNGNLAGASLSPLHTKTYQASSQPGSTSKDLTNNNIPHLLSPKEAKSKTEFDFNIDPKPSEGPGTKYLKSNSRSQQNRHSFMESSQSKAGTLQPNEKQSRHSYIDTIPQSSRSPSYRTKAKSHGALSDSKSVSNLSEARAQIAEPSTSRYFPSSCLDLNSPTSPTPTRHSDTRTLLSPSGRNNRNEGTLDSRRTTTRHSKTMEELKLPEHMDSSHSHSLSAPHESFSYGLGYTSPFSSQQRPHRHSMYVTRDKVRAKGLDGSLSIGQGMAARANSLQLLSPQPGEQLPPEMTVARSSVKETSREGTSSFHTRQKSEGGVYHDPHSDDGTAPKENRHLYNDPVPRRVGSFYRVPSPRPDNSFHENNVSTRVSSLPSESSSGTNHSKRQPAFDPWKSPENISHSEQLKEKEKQGFFRSMKKKKKKSQTVPNSDSPDLLTLQKSIHSASTPSSRPKEWRPEKISDLQTQSQPLKSLRKLLHLSSASNHPASSDPRFQPLTAQQTKNSFSEIRIHPLSQASGGSSNIRQEPAPKGRPALQLPGQMDPGWHVSSVTRSATEGPSYSEQLGAKSGPNGHPYNRTNRSRMPNLNDLKETALGGGGSENLYFQGDYKDHDGDYKDHDIDYKDDDDKDGAPHHHHHH

SEQ ID NO: 45 - protein, 1134 aa, Artificial Sequence
  MBiP_Tkappa28p_115_3xFlagHis_cho-opt in pOptiVec
MKLSLVAAMLLLLSLVAAMLLLLSAARAGDAAQPARRARRTKLAAYARKAARQARAGGGGSKIPNIGNVMNKFEILGVVGEGAYGVVLKCRHKETHEIVAIKKFKDSEENEEVKETTLRELKMLRTLKQENIVELKEAFRRRGKLYLVFEYVEKNMLELLEEMPNGVPPEKVKSYIYQLIKAIHWCHKNDIVHRDIKPENLLISHNDVLKLCDFGFARNLSEGNNANYTEYVATRWYRSPELLLGAPYGKSVDMWSVGCILGELSDGQPLFPGESEIDQLFTIQKVLGPLPSEQMKLFYSNPRFHGLRFPAVNHPQSLERRYLGILNSVLLDLMKNLLKLDPADRYLTEQCLNHPTFQTQRLLDRSPSRSAKRKPYHVESSTLSNRNQAGKSTALQSHHRSNSKDIQNLSVGLPRADEGLPANESFLNGNLAGASLSPLHTKTYQASSQPGSTSKDLTNNNIPHLLSPKEAKSKTEFDFNIDPKPSEGPGTKYLKSNSRSQQNRHSFMESSQSKAGTLQPNEKQSRHSYIDTIPQSSRSPSYRTKAKSHGALSDSKSVSNLSEARAQIAEPSTSRYFPSSCLDLNSPTSPTPTRHSDTRTLLSPSGRNNRNEGTLDSRRTTTRHSKTMEELKLPEHMDSSHSHSLSAPHESFSYGLGYTSPFSSQQRPHRHSMYVTRDKVRAKGLDGSLSIGQGMAARANSLQLLSPQPGEQLPPEMTVARSSVKETSREGTSSFHTRQKSEGGVYHDPHSDDGTAPKENRHLYNDPVPRRVGSFYRVPSPRPDNSFHENNVSTRVSSLPSESSSGTNHSKRQPAFDPWKSPENISHSEQLKEKEKQGFFRSMKKKKKKSQTVPNSDSPDLLTLQKSIHSASTPSSRPKEWRPEKISDLQTQSQPLKSLRKLLHLSSASNHPASSDPRFQPLTAQQTKNSFSEIRIHPLSQASGGSSNIRQEPAPKGRPALQLPDGGCDGRRQRHHSGPQDRRFMLRTTEQQGEYFCCGDPKKPHTPCVPNRALHRPISSPAPYPVLQVRGTSMCPTLQVRGTDAFSCPTQQSGFSFFVRHVMREALIHRAQVNQAALLTYHENAALTGKGGGGSENLYFQGDYKDHDGDYKDHDIDYKDDDDKDGAPHHHHHH

SEQ ID NO: 46 - protein, 1126 aa, Artificial Sequence
  Igkappa_Tkappa28p_115_3xFlagHis_cho-opt in pOptiVec
METDTLLLWVLLLWVPGSTGGDAAQPARRARRTKLAAYARKAARQARAGGGGSKIPNIGNVMNKFEILGVVGEGAYGVVLKCRHKETHEIVAIKKFKDSEENEEVKETTLRELKMLRTLKQENIVELKEAFRRRGKLYLVFEYVEKNMLELLEEMPNGVPPEKVKSYIYQLIKAIHWCHKNDIVHRDIKPENLLISHNDVLKLCDFGFARNLSEGNNANYTEYVATRWYRSPELLLGAPYGKSVDMWSVGCILGELSDGQPLFPGESEIDQLFTIQKVLGPLPSEQMKLFYSNPRFHGLRFPAVNHPQSLERRYLGILNSVLLDLMKNLLKLDPADRYLTEQCLNHPTFQTQRLLDRSPSRSAKRKPYHVESSTLSNRNQAGKSTALQSHHRSNSKDIQNLSVGLPRADEGLPANESFLNGNLAGASLSPLHTKTYQASSQPGSTSKDLTNNNIPHLLSPKEAKSKTEFDFNIDPKPSEGPGTKYLKSNSRSQQNRHSFMESSQSKAGTLQPNEKQSRHSYIDTIPQSSRSPSYRTKAKSHGALSDSKSVSNLSEARAQIAEPSTSRYFPSSCLDLNSPTSPTPTRHSDTRTLLSPSGRNNRNEGTLDSRRTTTRHSKTMEELKLPEHMDSSHSHSLSAPHESFSYGLGYTSPFSSQQRPHRHSMYVTRDKVRAKGLDGSLSIGQGMAARANSLQLLSPQPGEQLPPEMTVARSSVKETSREGTSSFHTRQKSEGGVYHDPHSDDGTAPKENRHLYNDPVPRRVGSFYRVPSPRPDNSFHENNVSTRVSSLPSESSSGTNHSKRQPAFDPWKSPENISHSEQLKEKEKQGFFRSMKKKKKKSQTVPNSDSPDLLTLQKSIHSASTPSSRPKEWRPEKISDLQTQSQPLKSLRKLLHLSSASNHPASSDPRFQPLTAQQTKNSFSEIRIHPLSQASGGSSNIRQEPAPKGRPALQLPDGGCDGRRQRHHSGPQDRRFMLRTTEQQGEYFCCGDPKKPHTPCVPNRALHRPISSPAPYPVLQVRGTSMCPTLQVRGTDAFSCPTQQSGFSFFVRHVMREALIHRAQVNQAALLTYHENAALTGKGGGGSENLYFQGDYKDHDGDYKDHDIDYKDDDDKDGAPHHHHHH

SEQ ID NO: 47 - protein, 1037 aa, Artificial Sequence
  Tkappa28p_107_3xFlagHis_cho-opt in pOptiVec
MGDAAQPARRARRTKLAAYARKAARQARAGGGGSKIPNIGNVMNKFEILGVVGEGAYGVVLKCRHKETHEIVAIKKFKDSEENEEVKETTLRELKMLRTLKQENIVELKEAFRRRGKLYLVFEYVEKNMLELLEEMPNGVPPEKVKSYIYQLIKAIHWCHKNDIVHRDIKPENLLISHNDVLKLCDFGFARNLSEGNNANYTEYVATRWYRSPELLLGAPYGKSVDMWSVGCILGELSDGQPLFPGESEIDQLFTIQKVLGPLPSEQMKLFYSNPRFHGLRFPAVNHPQSLERRYLGILNSVLLDLMKNLLKLDPADRYLTEQCLNHPTFQTQRLLDRSPSRSAKRKPYHVESSTLSNRNQAGKSTALQSHHRSNSKDIQNLSVGLPRADEGLPANESFLNGNLAGASLSPLHTKTYQASSQPGSTSKDLTNNNIPHLLSPKEAKSKTEFDFNIDPKPSEGPGTKYLKSNSRSQQNRHSFMESSQSKAGTLQPNEKQSRHSYIDTIPQSSRSPSYRTKAKSHGALSDSKSVSNLSEARAQIAEPSTSRYFPSSCLDLNSPTSPTPTRHSDTRTLLSPSGRNNRNEGTLDSRRTTTRHSKTMEELKLPEHMDSSHSHSLSAPHESFSYGLGYTSPFSSQQRPHRHSMYVTRDKVRAKGLDGSLSIGQGMAARANSLQLLSPQPGEQLPPEMTVARSSVKETSREGTSSFHTRQKSEGGVYHDPHSDDGTAPKENRHLYNDPVPRRVGSFYRVPSPRPDNSFHENNVSTRVSSLPSESSSGTNHSKRQPAFDPWKSPENISHSEQLKEKEKQGFFRSMKKKKKKSQTVPNSDSPDLLTLQKSIHSASTPSSRPKEWRPEKISDLQTQSQPLKSLRKLLHLSSASNHPASSDPRFQPLTAQQTKNSFSEIRIHPLSQASGGSSNIRQEPAPKGRPALQLPGQMDPGWHVSSVTRSATEGPSYSEQLGAKSGPNGHPYNRTNRSRMPNLNDLKETALGGGGSENLYFQGDYKDHDGDYKDHDIDYKDDDDKDGAPHHHHHH

SEQ ID NO: 48 - protein, 1037 aa, Artificial Sequence; identical to SEQ ID NO: 47
  Tkappa28p_107_3xFlagHis_ecoli-opt in pEX-1

SEQ ID NO: 49 - protein, 929 aa, Artificial Sequence
  delta853-960 in pEX-1
MGDAAQPARRARRTKLAAYARKAARQARAGGGGSKIPNIGNVMNKFEILGVVGEGAYGVVLKCRHKETHEIVAIKKFKDSEENEEVKETTLRELKMLRTLKQENIVELKEAFRRRGKLYLVFEYVEKNMLELLEEMPNGVPPEKVKSYIYQLIKAIHWCHKNDIVHRDIKPENLLISHNDVLKLCDFGFARNLSEGNNANYTEYVATRWYRSPELLLGAPYGKSVDMWSVGCILGELSDGQPLFPGESEIDQLFTIQKVLGPLPSEQMKLFYSNPRFHGLRFPAVNHPQSLERRYLGILNSVLLDLMKNLLKLDPADRYLTEQCLNHPTFQTQRLLDRSPSRSAKRKPYHVESSTLSNRNQAGKSTALQSHHRSNSKDIQNLSVGLPRADEGLPANESFLNGNLAGASLSPLHTKTYQASSQPGSTSKDLTNNNIPHLLSPKEAKSKTEFDFNIDPKPSEGPGTKYLKSNSRSQQNRHSFMESSQSKAGTLQPNEKQSRHSYIDTIPQSSRSPSYRTKAKSHGALSDSKSVSNLSEARAQIAEPSTSRYFPSSCLDLNSPTSPTPTRHSDTRTLLSPSGRNNRNEGTLDSRRTTTRHSKTMEELKLPEHMDSSHSHSLSAPHESFSYGLGYTSPFSSQQRPHRHSMYVTRDKVRAKGLDGSLSIGQGMAARANSLQLLSPQPGEQLPPEMTVARSSVKETSREGTSSFHTRQKSEGGVYHDPHSDDGTAPKENRHLYNDPVPRRVGSFYRVPSPRPDNSFHENNVSTRVSSLPSESSSGTNHSKRQPAFDPWKSPENISHSEQLKEKEKQGFFRSMKKKKKKSQTVPNSDSPDLLTLQKSIHSASTPSSRPKEWRPEKISDLQTQSQPLKSLRKLLHLSSASNHPGGGGSENLYFQGDYKDHDGDYKDHDIDYKDDDDKDGAPHHHHHH

SEQ ID NO: 50 - protein, 821 aa, Artificial Sequence
  delta745-960 in pEX-1
MGDAAQPARRARRTKLAAYARKAARQARAGGGGSKIPNIGNVMNKFEILGVVGEGAYGVVLKCRHKETHEIVAIKKFKDSEENEEVKETTLRELKMLRTLKQENIVELKEAFRRRGKLYLVFEYVEKNMLELLEEMPNGVPPEKVKSYIYQLIKAIHWCHKNDIVHRDIKPENLLISHNDVLKLCDFGFARNLSEGNNANYTEYVATRWYRSPELLLGAPYGKSVDMWSVGCILGELSDGQPLFPGESEIDQLFTIQKVLGPLPSEQMKLFYSNPRFHGLRFPAVNHPQSLERRYLGILNSVLLDLMKNLLKLDPADRYLTEQCLNHPTFQTQRLLDRSPSRSAKRKPYHVESSTLSNRNQAGKSTALQSHHRSNSKDIQNLSVGLPRADEGLPANESFLNGNLAGASLSPLHTKTYQASSQPGSTSKDLTNNNIPHLLSPKEAKSKTEFDFNIDPKPSEGPGTKYLKSNSRSQQNRHSFMESSQSKAGTLQPNEKQSRHSYIDTIPQSSRSPSYRTKAKSHGALSDSKSVSNLSEARAQIAEPSTSRYFPSSCLDLNSPTSPTPTRHSDTRTLLSPSGRNNRNEGTLDSRRTTTRHSKTMEELKLPEHMDSSHSHSLSAPHESFSYGLGYTSPFSSQQRPHRHSMYVTRDKVRAKGLDGSLSIGQGMAARANSLQLLSPQPGEQLPPEMTVARSSVKETSREGTSSFHTRQKSEGGVYHDPHSDDGTAPKENRHLYNDPVPRRVGSFYRVPSPRPDNSFHENNVSTRVSSLPSESSGGGGSENLYFQGDYKDHDGDYKDHDIDYKDDDDKDGAPHHHHHH

SEQ ID NO: 51 - protein, 713 aa, Artificial Sequence
  delta637-960 in pEX-1
MGDAAQPARRARRTKLAAYARKAARQARAGGGGSKIPNIGNVMNKFEILGVVGEGAYGVVLKCRHKETHEIVAIKKFKDSEENEEVKETTLRELKMLRTLKQENIVELKEAFRRRGKLYLVFEYVEKNMLELLEEMPNGVPPEKVKSYIYQLIKAIHWCHKNDIVHRDIKPENLLISHNDVLKLCDFGFARNLSEGNNANYTEYVATRWYRSPELLLGAPYGKSVDMWSVGCILGELSDGQPLFPGESEIDQLFTIQKVLGPLPSEQMKLFYSNPRFHGLRFPAVNHPQSLERRYLGILNSVLLDLMKNLLKLDPADRYLTEQCLNHPTFQTQRLLDRSPSRSAKRKPYHVESSTLSNRNQAGKSTALQSHHRSNSKDIQNLSVGLPRADEGLPANESFLNGNLAGASLSPLHTKTYQASSQPGSTSKDLTNNNIPHLLSPKEAKSKTEFDFNIDPKPSEGPGTKYLKSNSRSQQNRHSFMESSQSKAGTLQPNEKQSRHSYIDTIPQSSRSPSYRTKAKSHGALSDSKSVSNLSEARAQIAEPSTSRYFPSSCLDLNSPTSPTPTRHSDTRTLLSPSGRNNRNEGTLDSRRTTTRHSKTMEELKLPEHMDSSHSHSLSAPHESFSYGLGYTSPFSSQQRPHRHSMYVTRDKVRAKGLDGSLSIGQGMAGGGGSENLYFQGDYKDHDGDYKDHDIDYKDDDDKDGAPHHHHHH

SEQ ID NO: 52 - protein, 605 aa, Artificial Sequence
  delta529-960 in pEX-1
MGDAAQPARRARRTKLAAYARKAARQARAGGGGSKIPNIGNVMNKFEILGVVGEGAYGVVLKCRHKETHEIVAIKKFKDSEENEEVKETTLRELKMLRTLKQENIVELKEAFRRRGKLYLVFEYVEKNMLELLEEMPNGVPPEKVKSYIYQLIKAIHWCHKNDIVHRDIKPENLLISHNDVLKLCDFGFARNLSEGNNANYTEYVATRWYRSPELLLGAPYGKSVDMWSVGCILGELSDGQPLFPGESEIDQLFTIQKVLGPLPSEQMKLFYSNPRFHGLRFPAVNHPQSLERRYLGILNSVLLDLMKNLLKLDPADRYLTEQCLNHPTFQTQRLLDRSPSRSAKRKPYHVESSTLSNRNQAGKSTALQSHHRSNSKDIQNLSVGLPRADEGLPANESFLNGNLAGASLSPLHTKTYQASSQPGSTSKDLTNNNIPHLLSPKEAKSKTEFDFNIDPKPSEGPGTKYLKSNSRSQQNRHSFMESSQSKAGTLQPNEKQSRHSYIDTIPQSSRSPSYRTKAKSHGALSDSKSVSNLSEARAQIAEPSTSRYFPSSCLDLNSPTGGGGSENLYFQGDYKDHDGDYKDHDIDYKDDDDKDGAPHHHHHH

SEQ ID NO: 53 - protein, 497 aa, Artificial Sequence
  delta421-960 in pEX-1
MGDAAQPARRARRTKLAAYARKAARQARAGGGGSKIPNIGNVMNKFEILGVVGEGAYGVVLKCRHKETHEIVAIKKFKDSEENEEVKETTLRELKMLRTLKQENIVELKEAFRRRGKLYLVFEYVEKNMLELLEEMPNGVPPEKVKSYIYQLIKAIHWCHKNDIVHRDIKPENLLISHNDVLKLCDFGFARNLSEGNNANYTEYVATRWYRSPELLLGAPYGKSVDMWSVGCILGELSDGQPLFPGESEIDQLFTIQKVLGPLPSEQMKLFYSNPRFHGLRFPAVNHPQSLERRYLGILNSVLLDLMKNLLKLDPADRYLTEQCLNHPTFQTQRLLDRSPSRSAKRKPYHVESSTLSNRNQAGKSTALQSHHRSNSKDIQNLSVGLPRADEGLPANESFLNGNLAGASLSPLHTKTYQASSQPGSTSKDLTNNNIPHLLSPKEAKSKTEFDFNGGGGSENLYFQGDYKDHDGDYKDHDIDYKDDDDKDGAPHHHHHH

SEQ ID NO: 54 - protein, 391 aa, Artificial Sequence
  delta315-960 in pEX-1
MGDAAQPARRARRTKLAAYARKAARQARAGGGGSKIPNIGNVMNKFEILGVVGEGAYGVVLKCRHKETHEIVAIKKFKDSEENEEVKETTLRELKMLRTLKQENIVELKEAFRRRGKLYLVFEYVEKNMLELLEEMPNGVPPEKVKSYIYQLIKAIHWCHKNDIVHRDIKPENLLISHNDVLKLCDFGFARNLSEGNNANYTEYVATRWYRSPELLLGAPYGKSVDMWSVGCILGELSDGQPLFPGESEIDQLFTIQKVLGPLPSEQMKLFYSNPRFHGLRFPAVNHPQSLERRYLGILNSVLLDLMKNLLKLDPADRYLTEQCLNHPTFQTQRLLDRSPSRSAKRKGGGGSENLYFQGDYKDHDGDYKDHDIDYKDDDDKDGAPHHHHHH

SEQ ID NO: 55 - protein, 931 aa, Artificial Sequence
  delta315-420 in pEX-1
MGDAAQPARRARRTKLAAYARKAARQARAGGGGSKIPNIGNVMNKFEILGVVGEGAYGVVLKCRHKETHEIVAIKKFKDSEENEEVKETTLRELKMLRTLKQENIVELKEAFRRRGKLYLVFEYVEKNMLELLEEMPNGVPPEKVKSYIYQLIKAIHWCHKNDIVHRDIKPENLLISHNDVLKLCDFGFARNLSEGNNANYTEYVATRWYRSPELLLGAPYGKSVDMWSVGCILGELSDGQPLFPGESEIDQLFTIQKVLGPLPSEQMKLFYSNPRFHGLRFPAVNHPQSLERRYLGILNSVLLDLMKNLLKLDPADRYLTEQCLNHPTFQTQRLLDRSPSRSAKRKIDPKPSEGPGTKYLKSNSRSQQNRHSFMESSQSKAGTLQPNEKQSRHSYIDTIPQSSRSPSYRTKAKSHGALSDSKSVSNLSEARAQIAEPSTSRYFPSSCLDLNSPTSPTPTRHSDTRTLLSPSGRNNRNEGTLDSRRTTTRHSKTMEELKLPEHMDSSHSHSLSAPHESFSYGLGYTSPFSSQQRPHRHSMYVTRDKVRAKGLDGSLSIGQGMAARANSLQLLSPQPGEQLPPEMTVARSSVKETSREGTSSFHTRQKSEGGVYHDPHSDDGTAPKENRHLYNDPVPRRVGSFYRVPSPRPDNSFHENNVSTRVSSLPSESSSGTNHSKRQPAFDPWKSPENISHSEQLKEKEKQGFFRSMKKKKKKSQTVPNSDSPDLLTLQKSIHSASTPSSRPKEWRPEKISDLQTQSQPLKSLRKLLHLSSASNHPASSDPRFQPLTAQQTKNSFSEIRIHPLSQASGGSSNIRQEPAPKGRPALQLPGQMDPGWHVSSVTRSATEGPSYSEQLGAKSGPNGHPYNRTNRSRMPNLNDLKETALGGGGSENLYFQGDYKDHDGDYKDHDIDYKDDDDKDGAPHHHHHH

SEQ ID NO: 56 - protein, 823 aa, Artificial Sequence
  delta315-528 in pEX-1
MGDAAQPARRARRTKLAAYARKAARQARAGGGGSKIPNIGNVMNKFEILGVVGEGAYGVVLKCRHKETHEIVAIKKFKDSEENEEVKETTLRELKMLRTLKQENIVELKEAFRRRGKLYLVFEYVEKNMLELLEEMPNGVPPEKVKSYIYQLIKAIHWCHKNDIVHRDIKPENLLISHNDVLKLCDFGFARNLSEGNNANYTEYVATRWYRSPELLLGAPYGKSVDMWSVGCILGELSDGQPLFPGESEIDQLFTIQKVLGPLPSEQMKLFYSNPRFHGLRFPAVNHPQSLERRYLGILNSVLLDLMKNLLKLDPADRYLTEQCLNHPTFQTQRLLDRSPSRSAKRKSPTPTRHSDTRTLLSPSGRNNRNEGTLDSRRTTTRHSKTMEELKLPEHMDSSHSHSLSAPHESFSYGLGYTSPFSSQQRPHRHSMYVTRDKVRAKGLDGSLSIGQGMAARANSLQLLSPQPGEQLPPEMTVARSSVKETSREGTSSFHTRQKSEGGVYHDPHSDDGTAPKENRHLYNDPVPRRVGSFYRVPSPRPDNSFHENNVSTRVSSLPSESSSGTNHSKRQPAFDPWKSPENISHSEQLKEKEKQGFFRSMKKKKKKSQTVPNSDSPDLLTLQKSIHSASTPSSRPKEWRPEKISDLQTQSQPLKSLRKLLHLSSASNHPASSDPRFQPLTAQQTKNSFSEIRIHPLSQASGGSSNIRQEPAPKGRPALQLPGQMDPGWHVSSVTRSATEGPSYSEQLGAKSGPNGHPYNRTNRSRMPNLNDLKETALGGGGSENLYFQGDYKDHDGDYKDHDIDYKDDDDKDGAPHHHHHH

SEQ ID NO: 57 - protein, 715 aa, Artificial Sequence
  delta315-636 in pEX-1
MGDAAQPARRARRTKLAAYARKAARQARAGGGGSKIPNIGNVMNKFEILGVVGEGAYGVVLKCRHKETHEIVAIKKFKDSEENEEVKETTLRELKMLRTLKQENIVELKEAFRRRGKLYLVFEYVEKNMLELLEEMPNGVPPEKVKSYIYQLIKAIHWCHKNDIVHRDIKPENLLISHNDVLKLCDFGFARNLSEGNNANYTEYVATRWYRSPELLLGAPYGKSVDMWSVGCILGELSDGQPLFPGESEIDQLFTIQKVLGPLPSEQMKLFYSNPRFHGLRFPAVNHPQSLERRYLGILNSVLLDLMKNLLKLDPADRYLTEQCLNHPTFQTQRLLDRSPSRSAKRKARANSLQLLSPQPGEQLPPEMTVARSSVKETSREGTSSFHTRQKSEGGVYHDPHSDDGTAPKENRHLYNDPVPRRVGSFYRVPSPRPDNSFHENNVSTRVSSLPSESSSGTNHSKRQPAFDPWKSPENISHSEQLKEKEKQGFFRSMKKKKKKSQTVPNSDSPDLLTLQKSIHSASTPSSRPKEWRPEKISDLQTQSQPLKSLRKLLHLSSASNHPASSDPRFQPLTAQQTKNSFSEIRIHPLSQASGGSSNIRQEPAPKGRPALQLPGQMDPGWHVSSVTRSATEGPSYSEQLGAKSGPNGHPYNRTNRSRMPNLNDLKETALGGGGSENLYFQGDYKDHDGDYKDHDIDYKDDDDKDGAPHHHHHH

SEQ ID NO: 58 - protein, 607 aa, Artificial Sequence
  delta315-744 in pEX-1
MGDAAQPARRARRTKLAAYARKAARQARAGGGGSKIPNIGNVMNKFEILGVVGEGAYGVVLKCRHKETHEIVAIKKFKDSEENEEVKETTLRELKMLRTLKQENIVELKEAFRRRGKLYLVFEYVEKNMLELLEEMPNGVPPEKVKSYIYQLIKAIHWCHKNDIVHRDIKPENLLISHNDVLKLCDFGFARNLSEGNNANYTEYVATRWYRSPELLLGAPYGKSVDMWSVGCILGELSDGQPLFPGESEIDQLFTIQKVLGPLPSEQMKLFYSNPRFHGLRFPAVNHPQSLERRYLGILNSVLLDLMKNLLKLDPADRYLTEQCLNHPTFQTQRLLDRSPSRSAKRKSGTNHSKRQPAFDPWKSPENISHSEQLKEKEKQGFFRSMKKKKKKSQTVPNSDSPDLLTLQKSIHSASTPSSRPKEWRPEKISDLQTQSQPLKSLRKLLHLSSASNHPASSDPRFQPLTAQQTKNSFSEIRIHPLSQASGGSSNIRQEPAPKGRPALQLPGQMDPGWHVSSVTRSATEGPSYSEQLGAKSGPNGHPYNRTNRSRMPNLNDLKETALGGGGSENLYFQGDYKDHDGDYKDHDIDYKDDDDKDGAPHHHHHH

SEQ ID NO: 59 - protein, 499 aa, Artificial Sequence
  delta315-852 in pEX-1
MGDAAQPARRARRTKLAAYARKAARQARAGGGGSKIPNIGNVMNKFEILGVVGEGAYGVVLKCRHKETHEIVAIKKFKDSEENEEVKETTLRELKMLRTLKQENIVELKEAFRRRGKLYLVFEYVEKNMLELLEEMPNGVPPEKVKSYIYQLIKAIHWCHKNDIVHRDIKPENLLISHNDVLKLCDFGFARNLSEGNNANYTEYVATRWYRSPELLLGAPYGKSVDMWSVGCILGELSDGQPLFPGESEIDQLFTIQKVLGPLPSEQMKLFYSNPRFHGLRFPAVNHPQSLERRYLGILNSVLLDLMKNLLKLDPADRYLTEQCLNHPTFQTQRLLDRSPSRSAKRKASSDPRFQPLTAQQTKNSFSEIRIHPLSQASGGSSNIRQEPAPKGRPALQLPGQMDPGWHVSSVTRSATEGPSYSEQLGAKSGPNGHPYNRTNRSRMPNLNDLKETALGGGGSENLYFQGDYKDHDGDYKDHDIDYKDDDDKDGAPHHHHHH

SEQ ID NO: 60 - protein, 1037 aa, Artificial Sequence
  TT28p_107_3xFlagHis_ecoli-opt in pEX-1
MGDAAQPARRARRTKLAAYGRKKRRQRRRGGGGSKIPNIGNVMNKFEILGVVGEGAYGVVLKCRHKETHEIVAIKKFKDSEENEEVKETTLRELKMLRTLKQENIVELKEAFRRRGKLYLVFEYVEKNMLELLEEMPNGVPPEKVKSYIYQLIKAIHWCHKNDIVHRDIKPENLLISHNDVLKLCDFGFARNLSEGNNANYTEYVATRWYRSPELLLGAPYGKSVDMWSVGCILGELSDGQPLFPGESEIDQLFTIQKVLGPLPSEQMKLFYSNPRFHGLRFPAVNHPQSLERRYLGILNSVLLDLMKNLLKLDPADRYLTEQCLNHPTFQTQRLLDRSPSRSAKRKPYHVESSTLSNRNQAGKSTALQSHHRSNSKDIQNLSVGLPRADEGLPANESFLNGNLAGASLSPLHTKTYQASSQPGSTSKDLTNNNIPHLLSPKEAKSKTEFDFNIDPKPSEGPGTKYLKSNSRSQQNRHSFMESSQSKAGTLQPNEKQSRHSYIDTIPQSSRSPSYRTKAKSHGALSDSKSVSNLSEARAQIAEPSTSRYFPSSCLDLNSPTSPTPTRHSDTRTLLSPSGRNNRNEGTLDSRRTTTRHSKTMEELKLPEHMDSSHSHSLSAPHESFSYGLGYTSPFSSQQRPHRHSMYVTRDKVRAKGLDGSLSIGQGMAARANSLQLLSPQPGEQLPPEMTVARSSVKETSREGTSSFHTRQKSEGGVYHDPHSDDGTAPKENRHLYNDPVPRRVGSFYRVPSPRPDNSFHENNVSTRVSSLPSESSSGTNHSKRQPAFDPWKSPENISHSEQLKEKEKQGFFRSMKKKKKKSQTVPNSDSPDLLTLQKSIHSASTPSSRPKEWRPEKISDLQTQSQPLKSLRKLLHLSSASNHPASSDPRFQPLTAQQTKNSFSEIRIHPLSQASGGSSNIRQEPAPKGRPALQLPGQMDPGWHVSSVTRSATEGPSYSEQLGAKSGPNGHPYNRTNRSRMPNLNDLKETALGGGGSENLYFQGDYKDHDGDYKDHDIDYKDDDDKDGAPHHHHHH

SEQ ID NO: 61 - protein, 316 aa, Artificial Sequence
  Tkappa28p_eGFP_ecoli-opt_3xFlagHis in pEX-1
MGDAAQPARRARRTKLAAYARKAARQARAGGGGSVSKGEELFTGVVPILVELDGDVNGHKFSVSGEGEGDATYGKLTLKFICTTGKLPVPWPTLVTTLTYGVQCFSRYPDHMKQHDFFKSAMPEGYVQERTIFFKDDGNYKTRAEVKFEGDTLVNRIELKGIDFKEDGNILGHKLEYNYNSHNVYIMADKQKNGIKVNFKIRHNIEDGSVQLADHYQQNTPIGDGPVLLPDNHYLSTQSALSKDPNEKRDHMVLLEFVTAAGITLGMDELYKGGGGSENLYFQGDYKDHDGDYKDHDIDYKDDDDKDGAPHHHHHH

SEQ ID NO: 62 - protein, 283 aa, Artificial Sequence
  eGFP_3xFlagHis_ecoli-opt in pEX-1
MVSKGEELFTGVVPILVELDGDVNGHKFSVSGEGEGDATYGKLTLKFICTTGKLPVPWPTLVTTLTYGVQCFSRYPDHMKQHDFFKSAMPEGYVQERTIFFKDDGNYKTRAEVKFEGDTLVNRIELKGIDFKEDGNILGHKLEYNYNSHNVYIMADKQKNGIKVNFKIRHNIEDGSVQLADHYQQNTPIGDGPVLLPDNHYLSTQSALSKDPNEKRDHMVLLEFVTAAGITLGMDELYKGGGGSENLYFQGDYKDHDGDYKDHDIDYKDDDDKDGAPHHHHHH

SEQ ID NO: 63 - protein, 739 aa, Artificial Sequence
  AMPH1-3xFlagHis in pEX-1 (ecoli-opt)
MADIKTGIFAKNVQKRLNRAQEKVLQKLGKADETKDEQFEEYVQNFKRQEAEGTRLQRELRGYLAAIKGMQEASMKLTESLHEVYEPDWYGREDVKMVGEKCDVLWEDFHQKLVDGSLLTLDTYLGQFPDIKNRIAKRSRKLVDYDSARHHLEALQSSKRKDESRISKAEEEFQKAQKVFEEFNVDLQEELPSLWSRRVGFYVNTFKNVSSLEAKFHKEIAVLCHKLYEVMTKLGDQHADKAFTIQGAPSDSGPLRIAKTPSPPEEPSPLPSPTASPNHTLAPASPAPARPRSPSQTRKGPPVPPLPKVTPTKELQQENIISFFEDNFVPEISVTTPSQNEVPEVKKEETLLDLDFDPFKPEVTPAGSAGVTHSPMSQTLPWDLWTTSTDLVQPASGGSFNGFTQPQDTSLFTMQTDQSMICNLAESEQAPPTEPKAEEPLAAVTPAVGLDLGMDTRAEEPVEEAVIIPGADADAAVGTLVSAAEGAPGEEAEAEKATVPAGEGVSLEEAKIGTETTEGAESAQPEAEELEATVPQEKVIPSVVIEPASNHEEEGENEITIGAEPKETTEDAAPPGPTSETPELATEQKPIQDPQPTPSAPAMGAADQLASAREASQELPPGFLYKVETLHDFEAANSDELTLQRGDVVLVVPSDSEADQDAGWLVGVKESDWLQYRDLATYKGLFPENFTRRLDENLYFQGGGGGSDYKDHDGDYKDHDIDYKDDDDKDGAPHHHHHH

SEQ ID NO: 64 - protein, 739 aa, Artificial Sequence; identical to SEQ ID NO: 63
  AMPH1-3xFlagHis cho-opt in pOptiVec

SEQ ID NO: 65 - protein, 1048 aa, Artificial Sequence
  MBip_TATkappa11_107_3xFlagHis_cho-opt in pOptiVec
MKLSLVAAMLLLLSLVAAMLLLLSAARAGYARKAARQARAGGGGSKIPNIGNVMNKFEILGVVGEGAYGVVLKCRHKETHEIVAIKKFKDSEENEEVKETTLRELKMLRTLKQENIVELKEAFRRRGKLYLVFEYVEKNMLELLEEMPNGVPPEKVKSYIYQLIKAIHWCHKNDIVHRDIKPENLLISHNDVLKLCDFGFARNLSEGNNANYTEYVATRWYRSPELLLGAPYGKSVDMWSVGCILGELSDGQPLFPGESEIDQLFTIQKVLGPLPSEQMKLFYSNPRFHGLRFPAVNHPQSLERRYLGILNSVLLDLMKNLLKLDPADRYLTEQCLNHPTFQTQRLLDRSPSRSAKRKPYHVESSTLSNRNQAGKSTALQSHHRSNSKDIQNLSVGLPRADEGLPANESFLNGNLAGASLSPLHTKTYQASSQPGSTSKDLTNNNIPHLLSPKEAKSKTEFDFNIDPKPSEGPGTKYLKSNSRSQQNRHSFMESSQSKAGTLQPNEKQSRHSYIDTIPQSSRSPSYRTKAKSHGALSDSKSVSNLSEARAQIAEPSTSRYFPSSCLDLNSPTSPTPTRHSDTRTLLSPSGRNNRNEGTLDSRRTTTRHSKTMEELKLPEHMDSSHSHSLSAPHESFSYGLGYTSPFSSQQRPHRHSMYVTRDKVRAKGLDGSLSIGQGMAARANSLQLLSPQPGEQLPPEMTVARSSVKETSREGTSSFHTRQKSEGGVYHDPHSDDGTAPKENRHLYNDPVPRRVGSFYRVPSPRPDNSFHENNVSTRVSSLPSESSSGTNHSKRQPAFDPWKSPENISHSEQLKEKEKQGFFRSMKKKKKKSQTVPNSDSPDLLTLQKSIHSASTPSSRPKEWRPEKISDLQTQSQPLKSLRKLLHLSSASNHPASSDPRFQPLTAQQTKNSFSEIRIHPLSQASGGSSNIRQEPAPKGRPALQLPGQMDPGWHVSSVTRSATEGPSYSEQLGAKSGPNGHPYNRTNRSRMPNLNDLKETALGGGGSENLYFQGDYKDHDGDYKDHDIDYKDDDDKDGAPHHHHHH

SEQ ID NO: 66 - protein, 1040 aa, Artificial Sequence
  Igkappa_TATkappa11_107_3xFlagHis_cho-opt in pOptiVec
METDTLLLWVLLLWVPGSTGGYARKAARQARAGGGGSKIPNIGNVMNKFEILGVVGEGAYGVVLKCRHKETHEIVAIKKFKDSEENEEVKETTLRELKMLRTLKQENIVELKEAFRRRGKLYLVFEYVEKNMLELLEEMPNGVPPEKVKSYIYQLIKAIHWCHKNDIVHRDIKPENLLISHNDVLKLCDFGFARNLSEGNNANYTEYVATRWYRSPELLLGAPYGKSVDMWSVGCILGELSDGQPLFPGESEIDQLFTIQKVLGPLPSEQMKLFYSNPRFHGLRFPAVNHPQSLERRYLGILNSVLLDLMKNLLKLDPADRYLTEQCLNHPTFQTQRLLDRSPSRSAKRKPYHVESSTLSNRNQAGKSTALQSHHRSNSKDIQNLSVGLPRADEGLPANESFLNGNLAGASLSPLHTKTYQASSQPGSTSKDLTNNNIPHLLSPKEAKSKTEFDFNIDPKPSEGPGTKYLKSNSRSQQNRHSFMESSQSKAGTLQPNEKQSRHSYIDTIPQSSRSPSYRTKAKSHGALSDSKSVSNLSEARAQIAEPSTSRYFPSSCLDLNSPTSPTPTRHSDTRTLLSPSGRNNRNEGTLDSRRTTTRHSKTMEELKLPEHMDSSHSHSLSAPHESFSYGLGYTSPFSSQQRPHRHSMYVTRDKVRAKGLDGSLSIGQGMAARANSLQLLSPQPGEQLPPEMTVARSSVKETSREGTSSFHTRQKSEGGVYHDPHSDDGTAPKENRHLYNDPVPRRVGSFYRVPSPRPDNSFHENNVSTRVSSLPSESSSGTNHSKRQPAFDPWKSPENISHSEQLKEKEKQGFFRSMKKKKKKSQTVPNSDSPDLLTLQKSIHSASTPSSRPKEWRPEKISDLQTQSQPLKSLRKLLHLSSASNHPASSDPRFQPLTAQQTKNSFSEIRIHPLSQASGGSSNIRQEPAPKGRPALQLPGQMDPGWHVSSVTRSATEGPSYSEQLGAKSGPNGHPYNRTNRSRMPNLNDLKETALGGGGSENLYFQGDYKDHDGDYKDHDIDYKDDDDKDGAPHHHHHH

SEQ ID NO: 67 - protein, 1021 aa, Artificial Sequence
  TATkappa11_107_3xFlagHis_cho-opt in pOptiVec (leaderless)
MGYARKAARQARAGGGGSKIPNIGNVMNKFEILGVVGEGAYGVVLKCRHKETHEIVAIKKFKDSEENEEVKETTLRELKMLRTLKQENIVELKEAFRRRGKLYLVFEYVEKNMLELLEEMPNGVPPEKVKSYIYQLIKAIHWCHKNDIVHRDIKPENLLISHNDVLKLCDFGFARNLSEGNNANYTEYVATRWYRSPELLLGAPYGKSVDMWSVGCILGELSDGQPLFPGESEIDQLFTIQKVLGPLPSEQMKLFYSNPRFHGLRFPAVNHPQSLERRYLGILNSVLLDLMKNLLKLDPADRYLTEQCLNHPTFQTQRLLDRSPSRSAKRKPYHVESSTLSNRNQAGKSTALQSHHRSNSKDIQNLSVGLPRADEGLPANESFLNGNLAGASLSPLHTKTYQASSQPGSTSKDLTNNNIPHLLSPKEAKSKTEFDFNIDPKPSEGPGTKYLKSNSRSQQNRHSFMESSQSKAGTLQPNEKQSRHSYIDTIPQSSRSPSYRTKAKSHGALSDSKSVSNLSEARAQIAEPSTSRYFPSSCLDLNSPTSPTPTRHSDTRTLLSPSGRNNRNEGTLDSRRTTTRHSKTMEELKLPEHMDSSHSHSLSAPHESFSYGLGYTSPFSSQQRPHRHSMYVTRDKVRAKGLDGSLSIGQGMAARANSLQLLSPQPGEQLPPEMTVARSSVKETSREGTSSFHTRQKSEGGVYHDPHSDDGTAPKENRHLYNDPVPRRVGSFYRVPSPRPDNSFHENNVSTRVSSLPSESSSGTNHSKRQPAFDPWKSPENISHSEQLKEKEKQGFFRSMKKKKKKSQTVPNSDSPDLLTLQKSIHSASTPSSRPKEWRPEKISDLQTQSQPLKSLRKLLHLSSASNHPASSDPRFQPLTAQQTKNSFSEIRIHPLSQASGGSSNIRQEPAPKGRPALQLPGQMDPGWHVSSVTRSATEGPSYSEQLGAKSGPNGHPYNRTNRSRMPNLNDLKETALGGGGSENLYFQGDYKDHDGDYKDHDIDYKDDDDKDGAPHHHHHH

SEQ ID NO: 68 - protein, 1021 aa, Artificial Sequence; identical to SEQ ID NO: 67
  TATkappa11_107_3xFlagHis_ecoli-opt in pEX-1

SEQ ID NO: 69 - protein, 1021 aa, Artificial Sequence
  TAT11_107_3xFlagHis_ecoli-opt in pEX-1
MGYGRKKRRQRRRGGGGSKIPNIGNVMNKFEILGVVGEGAYGVVLKCRHKETHEIVAIKKFKDSEENEEVKETTLRELKMLRTLKQENIVELKEAFRRRGKLYLVFEYVEKNMLELLEEMPNGVPPEKVKSYIYQLIKAIHWCHKNDIVHRDIKPENLLISHNDVLKLCDFGFARNLSEGNNANYTEYVATRWYRSPELLLGAPYGKSVDMWSVGCILGELSDGQPLFPGESEIDQLFTIQKVLGPLPSEQMKLFYSNPRFHGLRFPAVNHPQSLERRYLGILNSVLLDLMKNLLKLDPADRYLTEQCLNHPTFQTQRLLDRSPSRSAKRKPYHVESSTLSNRNQAGKSTALQSHHRSNSKDIQNLSVGLPRADEGLPANESFLNGNLAGASLSPLHTKTYQASSQPGSTSKDLTNNNIPHLLSPKEAKSKTEFDFNIDPKPSEGPGTKYLKSNSRSQQNRHSFMESSQSKAGTLQPNEKQSRHSYIDTIPQSSRSPSYRTKAKSHGALSDSKSVSNLSEARAQIAEPSTSRYFPSSCLDLNSPTSPTPTRHSDTRTLLSPSGRNNRNEGTLDSRRTTTRHSKTMEELKLPEHMDSSHSHSLSAPHESFSYGLGYTSPFSSQQRPHRHSMYVTRDKVRAKGLDGSLSIGQGMAARANSLQLLSPQPGEQLPPEMTVARSSVKETSREGTSSFHTRQKSEGGVYHDPHSDDGTAPKENRHLYNDPVPRRVGSFYRVPSPRPDNSFHENNVSTRVSSLPSESSSGTNHSKRQPAFDPWKSPENISHSEQLKEKEKQGFFRSMKKKKKKSQTVPNSDSPDLLTLQKSIHSASTPSSRPKEWRPEKISDLQTQSQPLKSLRKLLHLSSASNHPASSDPRFQPLTAQQTKNSFSEIRIHPLSQASGGSSNIRQEPAPKGRPALQLPGQMDPGWHVSSVTRSATEGPSYSEQLGAKSGPNGHPYNRTNRSRMPNLNDLKETALGGGGSENLYFQGDYKDHDGDYKDHDIDYKDDDDKDGAPHHHHHH

SEQ ID NO: 70 - protein, 1021 aa, Artificial Sequence; identical to SEQ ID NO: 69
  TAT11_107_3xFlagHis_cho-opt in pOptiVec (leaderless)

SEQ ID NO: 71 - protein, 1026 aa, Artificial Sequence
  ANTP_107_3xFlagHis_cho-opt in pOptiVec
MGRQIKIWFQNRRMKWKKGGGGSKIPNIGNVMNKFEILGVVGEGAYGVVLKCRHKETHEIVAIKKFKDSEENEEVKETTLRELKMLRTLKQENIVELKEAFRRRGKLYLVFEYVEKNMLELLEEMPNGVPPEKVKSYIYQLIKAIHWCHKNDIVHRDIKPENLLISHNDVLKLCDFGFARNLSEGNNANYTEYVATRWYRSPELLLGAPYGKSVDMWSVGCILGELSDGQPLFPGESEIDQLFTIQKVLGPLPSEQMKLFYSNPRFHGLRFPAVNHPQSLERRYLGILNSVLLDLMKNLLKLDPADRYLTEQCLNHPTFQTQRLLDRSPSRSAKRKPYHVESSTLSNRNQAGKSTALQSHHRSNSKDIQNLSVGLPRADEGLPANESFLNGNLAGASLSPLHTKTYQASSQPGSTSKDLTNNNIPHLLSPKEAKSKTEFDFNIDPKPSEGPGTKYLKSNSRSQQNRHSFMESSQSKAGTLQPNEKQSRHSYIDTIPQSSRSPSYRTKAKSHGALSDSKSVSNLSEARAQIAEPSTSRYFPSSCLDLNSPTSPTPTRHSDTRTLLSPSGRNNRNEGTLDSRRTTTRHSKTMEELKLPEHMDSSHSHSLSAPHESFSYGLGYTSPFSSQQRPHRHSMYVTRDKVRAKGLDGSLSIGQGMAARANSLQLLSPQPGEQLPPEMTVARSSVKETSREGTSSFHTRQKSEGGVYHDPHSDDGTAPKENRHLYNDPVPRRVGSFYRVPSPRPDNSFHENNVSTRVSSLPSESSSGTNHSKRQPAFDPWKSPENISHSEQLKEKEKQGFFRSMKKKKKKSQTVPNSDSPDLLTLQKSIHSASTPSSRPKEWRPEKISDLQTQSQPLKSLRKLLHLSSASNHPASSDPRFQPLTAQQTKNSFSEIRIHPLSQASGGSSNIRQEPAPKGRPALQLPGQMDPGWHVSSVTRSATEGPSYSEQLGAKSGPNGHPYNRTNRSRMPNLNDLKETALGGGGSENLYFQGDYKDHDGDYKDHDIDYKDDDDKDGAPHHHHHH

SEQ ID NO: 72 - protein, 1031 aa, Artificial Sequence
  TRANSP_107_3xFlagHis_cho-opt in pOptiVec
MGAGYLLGKINLKALAALAKKILGGGGSKIPNIGNVMNKFEILGVVGEGAYGVVLKCRHKETHEIVAIKKFKDSEENEEVKETTLRELKMLRTLKQENIVELKEAFRRRGKLYLVFEYVEKNMLELLEEMPNGVPPEKVKSYIYQLIKAIHWCHKNDIVHRDIKPENLLISHNDVLKLCDFGFARNLSEGNNANYTEYVATRWYRSPELLLGAPYGKSVDMWSVGCILGELSDGQPLFPGESEIDQLFTIQKVLGPLPSEQMKLFYSNPRFHGLRFPAVNHPQSLERRYLGILNSVLLDLMKNLLKLDPADRYLTEQCLNHPTFQTQRLLDRSPSRSAKRKPYHVESSTLSNRNQAGKSTALQSHHRSNSKDIQNLSVGLPRADEGLPANESFLNGNLAGASLSPLHTKTYQASSQPGSTSKDLTNNNIPHLLSPKEAKSKTEFDFNIDPKPSEGPGTKYLKSNSRSQQNRHSFMESSQSKAGTLQPNEKQSRHSYIDTIPQSSRSPSYRTKAKSHGALSDSKSVSNLSEARAQIAEPSTSRYFPSSCLDLNSPTSPTPTRHSDTRTLLSPSGRNNRNEGTLDSRRTTTRHSKTMEELKLPEHMDSSHSHSLSAPHESFSYGLGYTSPFSSQQRPHRHSMYVTRDKVRAKGLDGSLSIGQGMAARANSLQLLSPQPGEQLPPEMTVARSSVKETSREGTSSFHTRQKSEGGVYHDPHSDDGTAPKENRHLYNDPVPRRVGSFYRVPSPRPDNSFHENNVSTRVSSLPSESSSGTNHSKRQPAFDPWKSPENISHSEQLKEKEKQGFFRSMKKKKKKSQTVPNSDSPDLLTLQKSIHSASTPSSRPKEWRPEKISDLQTQSQPLKSLRKLLHLSSASNHPASSDPRFQPLTAQQTKNSFSEIRIHPLSQASGGSSNIRQEPAPKGRPALQLPGQMDPGWHVSSVTRSATEGPSYSEQLGAKSGPNGHPYNRTNRSRMPNLNDLKETALGGGGSENLYFQGDYKDHDGDYKDHDIDYKDDDDKDGAPHHHHHH

SEQ ID NO: 73 - protein, 1037 aa, Artificial Sequence; identical to SEQ ID NO: 60
  TAT28_107_3xFlagHis_cho-opt in pOptiVec

SEQ ID NO: 74 - protein, 1049 aa, Artificial Sequence
  MBIP_P97_107_3xFlagHis_cho-opt in pOptiVec
MKLSLVAAMLLLLSLVAAMLLLLSAARAGDSSHAFTLDELRGGGGSKIPNIGNVMNKFEILGVVGEGAYGVVLKCRHKETHEIVAIKKFKDSEENEEVKETTLRELKMLRTLKQENIVELKEAFRRRGKLYLVFEYVEKNMLELLEEMPNGVPPEKVKSYIYQLIKAIHWCHKNDIVHRDIKPENLLISHNDVLKLCDFGFARNLSEGNNANYTEYVATRWYRSPELLLGAPYGKSVDMWSVGCILGELSDGQPLFPGESEIDQLFTIQKVLGPLPSEQMKLFYSNPRFHGLRFPAVNHPQSLERRYLGILNSVLLDLMKNLLKLDPADRYLTEQCLNHPTFQTQRLLDRSPSRSAKRKPYHVESSTLSNRNQAGKSTALQSHHRSNSKDIQNLSVGLPRADEGLPANESFLNGNLAGASLSPLHTKTYQASSQPGSTSKDLTNNNIPHLLSPKEAKSKTEFDFNIDPKPSEGPGTKYLKSNSRSQQNRHSFMESSQSKAGTLQPNEKQSRHSYIDTIPQSSRSPSYRTKAKSHGALSDSKSVSNLSEARAQIAEPSTSRYFPSSCLDLNSPTSPTPTRHSDTRTLLSPSGRNNRNEGTLDSRRTTTRHSKTMEELKLPEHMDSSHSHSLSAPHESFSYGLGYTSPFSSQQRPHRHSMYVTRDKVRAKGLDGSLSIGQGMAARANSLQLLSPQPGEQLPPEMTVARSSVKETSREGTSSFHTRQKSEGGVYHDPHSDDGTAPKENRHLYNDPVPRRVGSFYRVPSPRPDNSFHENNVSTRVSSLPSESSSGTNHSKRQPAFDPWKSPENISHSEQLKEKEKQGFFRSMKKKKKKSQTVPNSDSPDLLTLQKSIHSASTPSSRPKEWRPEKISDLQTQSQPLKSLRKLLHLSSASNHPASSDPRFQPLTAQQTKNSFSEIRIHPLSQASGGSSNIRQEPAPKGRPALQLPGQMDPGWHVSSVTRSATEGPSYSEQLGAKSGPNGHPYNRTNRSRMPNLNDLKETALGGGGSENLYFQGDYKDHDGDYKDHDIDYKDDDDKDGAPHHHHHH

SEQ ID NO: 75 - protein, 1022 aa, Artificial Sequence
  P97_107_3xFlagHis_human-opt in pT7CFE1
MGDSSHAFTLDELRGGGGSKIPNIGNVMNKFEILGVVGEGAYGVVLKCRHKETHEIVAIKKFKDSEENEEVKETTLRELKMLRTLKQENIVELKEAFRRRGKLYLVFEYVEKNMLELLEEMPNGVPPEKVKSYIYQLIKAIHWCHKNDIVHRDIKPENLLISHNDVLKLCDFGFARNLSEGNNANYTEYVATRWYRSPELLLGAPYGKSVDMWSVGCILGELSDGQPLFPGESEIDQLFTIQKVLGPLPSEQMKLFYSNPRFHGLRFPAVNHPQSLERRYLGILNSVLLDLMKNLLKLDPADRYLTEQCLNHPTFQTQRLLDRSPSRSAKRKPYHVESSTLSNRNQAGKSTALQSHHRSNSKDIQNLSVGLPRADEGLPANESFLNGNLAGASLSPLHTKTYQASSQPGSTSKDLTNNNIPHLLSPKEAKSKTEFDFNIDPKPSEGPGTKYLKSNSRSQQNRHSFMESSQSKAGTLQPNEKQSRHSYIDTIPQSSRSPSYRTKAKSHGALSDSKSVSNLSEARAQIAEPSTSRYFPSSCLDLNSPTSPTPTRHSDTRTLLSPSGRNNRNEGTLDSRRTTTRHSKTMEELKLPEHMDSSHSHSLSAPHESFSYGLGYTSPFSSQQRPHRHSMYVTRDKVRAKGLDGSLSIGQGMAARANSLQLLSPQPGEQLPPEMTVARSSVKETSREGTSSFHTRQKSEGGVYHDPHSDDGTAPKENRHLYNDPVPRRVGSFYRVPSPRPDNSFHENNVSTRVSSLPSESSSGTNHSKRQPAFDPWKSPENISHSEQLKEKEKQGFFRSMKKKKKKSQTVPNSDSPDLLTLQKSIHSASTPSSRPKEWRPEKISDLQTQSQPLKSLRKLLHLSSASNHPASSDPRFQPLTAQQTKNSFSEIRIHPLSQASGGSSNIRQEPAPKGRPALQLPGQMDPGWHVSSVTRSATEGPSYSEQLGAKSGPNGHPYNRTNRSRMPNLNDLKETALGGGGSENLYFQGDYKDHDGDYKDHDIDYKDDDDKDGAPHHHHHH

SEQ ID NO: 76 - protein, 1037 aa, Artificial Sequence; identical to SEQ ID NO: 47
  Tkappa28p_107_3xFlagHis_human-opt in pOptiVec

SEQ ID NO: 77 - protein, 1021 aa, Artificial Sequence; identical to SEQ ID NO: 67
  TATkappa11_107_3xFlagHis_human-opt in pOptiVec

SEQ ID NO: 78 - protein, 1037 aa, Artificial Sequence; identical to SEQ ID NO: 60
  TAT28_107_3xFlagHis_human-opt in pOptiVec

SEQ ID NO: 79 - protein, 1021 aa, Artificial Sequence; identical to SEQ ID NO: 69
  TAT11_107_3xFlagHis_human-opt in pOptiVec

SEQ ID NO: 80 - protein, 1026 aa, Artificial Sequence; identical to SEQ ID NO: 71
  ANTP_107_3xFlagHis_human-opt in pOptiVec

SEQ ID NO: 81 - protein, 1031 aa, Artificial Sequence; identical to SEQ ID NO: 72
  TRANSP_107_3xFlagHis_human-opt in pOptiVec

SEQ ID NO: 82 - protein, 1064 aa, Artificial Sequence; identical to SEQ ID NO: 43
  MBip_Tkappa28p_107_3xFlagHis_human-opt in pOptiVec

SEQ ID NO: 83 - protein, 1268 aa, Artificial Sequence
  -GST-P-TATkappa28-CDKL5_107-P-FH_pVL1393 (insect)
MSPILGYWKIKGLVQPTRLLLEYLEEKYEEHLYERDEGDKWRNKKFELGLEFPNLPYYIDGDVKLTQSMAIIRYIADKHNMLGGCPKERAEISMLEGAVLDIRYGVSRIAYSKDFETLKVDFLSKLPEMLKMFEDRLCHKTYLNGDHVTHPDFMLYDALDVVLYMDPMCLDAFPKLVCFKKRIEAIPQIDKYLKSSKYIAWPLQGWQATFGGGDHPPKSGGGGSLEVLFQGPDAAQPARRARRTKLAAYARKAARQARAGGGGSKIPNIGNVMNKFEILGVVGEGAYGVVLKCRHKETHEIVAIKKFKDSEENEEVKETTLRELKMLRTLKQENIVELKEAFRRRGKLYLVFEYVEKNMLELLEEMPNGVPPEKVKSYIYQLIKAIHWCHKNDIVHRDIKPENLLISHNDVLKLCDFGFARNLSEGNNANYTEYVATRWYRSPELLLGAPYGKSVDMWSVGCILGELSDGQPLFPGESEIDQLFTIQKVLGPLPSEQMKLFYSNPRFHGLRFPAVNHPQSLERRYLGILNSVLLDLMKNLLKLDPADRYLTEQCLNHPTFQTQRLLDRSPSRSAKRKPYHVESSTLSNRNQAGKSTALQSHHRSNSKDIQNLSVGLPRADEGLPANESFLNGNLAGASLSPLHTKTYQASSQPGSTSKDLTNNNIPHLLSPKEAKSKTEFDFNIDPKPSEGPGTKYLKSNSRSQQNRHSFMESSQSKAGTLQPNEKQSRHSYIDTIPQSSRSPSYRTKAKSHGALSDSKSVSNLSEARAQIAEPSTSRYFPSSCLDLNSPTSPTPTRHSDTRTLLSPSGRNNRNEGTLDSRRTTTRHSKTMEELKLPEHMDSSHSHSLSAPHESFSYGLGYTSPFSSQQRPHRHSMYVTRDKVRAKGLDGSLSIGQGMAARANSLQLLSPQPGEQLPPEMTVARSSVKETSREGTSSFHTRQKSEGGVYHDPHSDDGTAPKENRHLYNDPVPRRVGSFYRVPSPRPDNSFHENNVSTRVSSLPSESSSGTNHSKRQPAFDPWKSPENISHSEQLKEKEKQGFFRSMKKKKKKSQTVPNSDSPDLLTLQKSIHSASTPSSRPKEWRPEKISDLQTQSQPLKSLRKLLHLSSASNHPASSDPRFQPLTAQQTKNSFSEIRIHPLSQASGGSSNIRQEPAPKGRPALQLPGQMDPGWHVSSVTRSATEGPSYSEQLGAKSGPNGHPYNRTNRSRMPNLNDLKETALGGGGSLEVLFQGPDYKDHDGDYKDHDIDYKDDDDKDGAPHHHHHH

SEQ ID NO: 84 - protein, 1252 aa, Artificial Sequence
  -GST-P-TATkappa11-CDKL5_107-P-FH_pVL1393 (insect)
MSPILGYWKIKGLVQPTRLLLEYLEEKYEEHLYERDEGDKWRNKKFELGLEFPNLPYYIDGDVKLTQSMAIIRYIADKHNMLGGCPKERAEISMLEGAVLDIRYGVSRIAYSKDFETLKVDFLSKLPEMLKMFEDRLCHKTYLNGDHVTHPDFMLYDALDVVLYMDPMCLDAFPKLVCFKKRIEAIPQIDKYLKSSKYIAWPLQGWQATFGGGDHPPKSGGGGSLEVLFQGPYARKAARQARAGGGGSKIPNIGNVMNKFEILGVVGEGAYGVVLKCRHKETHEIVAIKKFKDSEENEEVKETTLRELKMLRTLKQENIVELKEAFRRRGKLYLVFEYVEKNMLELLEEMPNGVPPEKVKSYIYQLIKAIHWCHKNDIVHRDIKPENLLISHNDVLKLCDFGFARNLSEGNNANYTEYVATRWYRSPELLLGAPYGKSVDMWSVGCILGELSDGQPLFPGESEIDQLFTIQKVLGPLPSEQMKLFYSNPRFHGLRFPAVNHPQSLERRYLGILNSVLLDLMKNLLKLDPADRYLTEQCLNHPTFQTQRLLDRSPSRSAKRKPYHVESSTLSNRNQAGKSTALQSHHRSNSKDIQNLSVGLPRADEGLPANESFLNGNLAGASLSPLHTKTYQASSQPGSTSKDLTNNNIPHLLSPKEAKSKTEFDFNIDPKPSEGPGTKYLKSNSRSQQNRHSFMESSQSKAGTLQPNEKQSRHSYIDTIPQSSRSPSYRTKAKSHGALSDSKSVSNLSEARAQIAEPSTSRYFPSSCLDLNSPTSPTPTRHSDTRTLLSPSGRNNRNEGTLDSRRTTTRHSKTMEELKLPEHMDSSHSHSLSAPHESFSYGLGYTSPFSSQQRPHRHSMYVTRDKVRAKGLDGSLSIGQGMAARANSLQLLSPQPGEQLPPEMTVARSSVKETSREGTSSFHTRQKSEGGVYHDPHSDDGTAPKENRHLYNDPVPRRVGSFYRVPSPRPDNSFHENNVSTRVSSLPSESSSGTNHSKRQPAFDPWKSPENISHSEQLKEKEKQGFFRSMKKKKKKSQTVPNSDSPDLLTLQKSIHSASTPSSRPKEWRPEKISDLQTQSQPLKSLRKLLHLSSASNHPASSDPRFQPLTAQQTKNSFSEIRIHPLSQASGGSSNIRQEPAPKGRPALQLPGQMDPGWHVSSVTRSATEGPSYSEQLGAKSGPNGHPYNRTNRSRMPNLNDLKETALGGGGSLEVLFQGPDYKDHDGDYKDHDIDYKDDDDKDGAPHHHHHH

SEQ ID NO: 85 - protein, 1268 aa, Artificial Sequence
  -GST-P-TAT28-CDKL5_107-P-FH_pVL1393 (insect)
MSPILGYWKIKGLVQPTRLLLEYLEEKYEEHLYERDEGDKWRNKKFELGLEFPNLPYYIDGDVKLTQSMAIIRYIADKHNMLGGCPKERAEISMLEGAVLDIRYGVSRIAYSKDFETLKVDFLSKLPEMLKMFEDRLCHKTYLNGDHVTHPDFMLYDALDVVLYMDPMCLDAFPKLVCFKKRIEAIPQIDKYLKSSKYIAWPLQGWQATFGGGDHPPKSGGGGSLEVLFQGPDAAQPARRARRTKLAAYGRKKRRQRRRGGGGSKIPNIGNVMNKFEILGVVGEGAYGVVLKCRHKETHEIVAIKKFKDSEENEEVKETTLRELKMLRTLKQENIVELKEAFRRRGKLYLVFEYVEKNMLELLEEMPNGVPPEKVKSYIYQLIKAIHWCHKNDIVHRDIKPENLLISHNDVLKLCDFGFARNLSEGNNANYTEYVATRWYRSPELLLGAPYGKSVDMWSVGCILGELSDGQPLFPGESEIDQLFTIQKVLGPLPSEQMKLFYSNPRFHGLRFPAVNHPQSLERRYLGILNSVLLDLMKNLLKLDPADRYLTEQCLNHPTFQTQRLLDRSPSRSAKRKPYHVESSTLSNRNQAGKSTALQSHHRSNSKDIQNLSVGLPRADEGLPANESFLNGNLAGASLSPLHTKTYQASSQPGSTSKDLTNNNIPHLLSPKEAKSKTEFDFNIDPKPSEGPGTKYLKSNSRSQQNRHSFMESSQSKAGTLQPNEKQSRHSYIDTIPQSSRSPSYRTKAKSHGALSDSKSVSNLSEARAQIAEPSTSRYFPSSCLDLNSPTSPTPTRHSDTRTLLSPSGRNNRNEGTLDSRRTTTRHSKTMEELKLPEHMDSSHSHSLSAPHESFSYGLGYTSPFSSQQRPHRHSMYVTRDKVRAKGLDGSLSIGQGMAARANSLQLLSPQPGEQLPPEMTVARSSVKETSREGTSSFHTRQKSEGGVYHDPHSDDGTAPKENRHLYNDPVPRRVGSFYRVPSPRPDNSFHENNVSTRVSSLPSESSSGTNHSKRQPAFDPWKSPENISHSEQLKEKEKQGFFRSMKKKKKKSQTVPNSDSPDLLTLQKSIHSASTPSSRPKEWRPEKISDLQTQSQPLKSLRKLLHLSSASNHPASSDPRFQPLTAQQTKNSFSEIRIHPLSQASGGSSNIRQEPAPKGRPALQLPGQMDPGWHVSSVTRSATEGPSYSEQLGAKSGPNGHPYNRTNRSRMPNLNDLKETALGGGGSLEVLFQGPDYKDHDGDYKDHDIDYKDDDDKDGAPHHHHHH

SEQ ID NO: 86 - protein, 1252 aa, Artificial Sequence
  -GST-P-TAT11-CDKL5_107-P-FH_pVL1393 (insect)
MSPILGYWKIKGLVQPTRLLLEYLEEKYEEHLYERDEGDKWRNKKFELGLEFPNLPYYIDGDVKLTQSMAIIRYIADKHNMLGGCPKERAEISMLEGAVLDIRYGVSRIAYSKDFETLKVDFLSKLPEMLKMFEDRLCHKTYLNGDHVTHPDFMLYDALDVVLYMDPMCLDAFPKLVCFKKRIEAIPQIDKYLKSSKYIAWPLQGWQATFGGGDHPPKSGGGGSLEVLFQGPYGRKKRRQRRRGGGGSKIPNIGNVMNKFEILGVVGEGAYGVVLKCRHKETHEIVAIKKFKDSEENEEVKETTLRELKMLRTLKQENIVELKEAFRRRGKLYLVFEYVEKNMLELLEEMPNGVPPEKVKSYIYQLIKAIHWCHKNDIVHRDIKPENLLISHNDVLKLCDFGFARNLSEGNNANYTEYVATRWYRSPELLLGAPYGKSVDMWSVGCILGELSDGQPLFPGESEIDQLFTIQKVLGPLPSEQMKLFYSNPRFHGLRFPAVNHPQSLERRYLGILNSVLLDLMKNLLKLDPADRYLTEQCLNHPTFQTQRLLDRSPSRSAKRKPYHVESSTLSNRNQAGKSTALQSHHRSNSKDIQNLSVGLPRADEGLPANESFLNGNLAGASLSPLHTKTYQASSQPGSTSKDLTNNNIPHLLSPKEAKSKTEFDFNIDPKPSEGPGTKYLKSNSRSQQNRHSFMESSQSKAGTLQPNEKQSRHSYIDTIPQSSRSPSYRTKAKSHGALSDSKSVSNLSEARAQIAEPSTSRYFPSSCLDLNSPTSPTPTRHSDTRTLLSPSGRNNRNEGTLDSRRTTTRHSKTMEELKLPEHMDSSHSHSLSAPHESFSYGLGYTSPFSSQQRPHRHSMYVTRDKVRAKGLDGSLSIGQGMAARANSLQLLSPQPGEQLPPEMTVARSSVKETSREGTSSFHTRQKSEGGVYHDPHSDDGTAPKENRHLYNDPVPRRVGSFYRVPSPRPDNSFHENNVSTRVSSLPSESSSGTNHSKRQPAFDPWKSPENISHSEQLKEKEKQGFFRSMKKKKKKSQTVPNSDSPDLLTLQKSIHSASTPSSRPKEWRPEKISDLQTQSQPLKSLRKLLHLSSASNHPASSDPRFQPLTAQQTKNSFSEIRIHPLSQASGGSSNIRQEPAPKGRPALQLPGQMDPGWHVSSVTRSATEGPSYSEQLGAKSGPNGHPYNRTNRSRMPNLNDLKETALGGGGSLEVLFQGPDYKDHDGDYKDHDIDYKDDDDKDGAPHHHHHH

SEQ ID NO: 87 - protein, 1257 aa, Artificial Sequence
  -GST-P-ANTP-CDKL5_107-P-FH_pVL1393 (insect)
MSPILGYWKIKGLVQPTRLLLEYLEEKYEEHLYERDEGDKWRNKKFELGLEFPNLPYYIDGDVKLTQSMAIIRYIADKHNMLGGCPKERAEISMLEGAVLDIRYGVSRIAYSKDFETLKVDFLSKLPEMLKMFEDRLCHKTYLNGDHVTHPDFMLYDALDVVLYMDPMCLDAFPKLVCFKKRIEAIPQIDKYLKSSKYIAWPLQGWQATFGGGDHPPKSGGGGSLEVLFQGPRQIKIWFQNRRMKWKKGGGGSKIPNIGNVMNKFEILGVVGEGAYGVVLKCRHKETHEIVAIKKFKDSEENEEVKETTLRELKMLRTLKQENIVELKEAFRRRGKLYLVFEYVEKNMLELLEEMPNGVPPEKVKSYIYQLIKAIHWCHKNDIVHRDIKPENLLISHNDVLKLCDFGFARNLSEGNNANYTEYVATRWYRSPELLLGAPYGKSVDMWSVGCILGELSDGQPLFPGESEIDQLFTIQKVLGPLPSEQMKLFYSNPRFHGLRFPAVNHPQSLERRYLGILNSVLLDLMKNLLKLDPADRYLTEQCLNHPTFQTQRLLDRSPSRSAKRKPYHVESSTLSNRNQAGKSTALQSHHRSNSKDIQNLSVGLPRADEGLPANESFLNGNLAGASLSPLHTKTYQASSQPGSTSKDLTNNNIPHLLSPKEAKSKTEFDFNIDPKPSEGPGTKYLKSNSRSQQNRHSFMESSQSKAGTLQPNEKQSRHSYIDTIPQSSRSPSYRTKAKSHGALSDSKSVSNLSEARAQIAEPSTSRYFPSSCLDLNSPTSPTPTRHSDTRTLLSPSGRNNRNEGTLDSRRTTTRHSKTMEELKLPEHMDSSHSHSLSAPHESFSYGLGYTSPFSSQQRPHRHSMYVTRDKVRAKGLDGSLSIGQGMAARANSLQLLSPQPGEQLPPEMTVARSSVKETSREGTSSFHTRQKSEGGVYHDPHSDDGTAPKENRHLYNDPVPRRVGSFYRVPSPRPDNSFHENNVSTRVSSLPSESSSGTNHSKRQPAFDPWKSPENISHSEQLKEKEKQGFFRSMKKKKKKSQTVPNSDSPDLLTLQKSIHSASTPSSRPKEWRPEKISDLQTQSQPLKSLRKLLHLSSASNHPASSDPRFQPLTAQQTKNSFSEIRIHPLSQASGGSSNIRQEPAPKGRPALQLPGQMDPGWHVSSVTRSATEGPSYSEQLGAKSGPNGHPYNRTNRSRMPNLNDLKETALGGGGSLEVLFQGPDYKDHDGDYKDHDIDYKDDDDKDGAPHHHHHH

SEQ ID NO: 88 - protein, 1262 aa, Artificial Sequence
  -GST-P-TRANSP-CDKL5_107-P-FH_pVL1393 (insect)
MSPILGYWKIKGLVQPTRLLLEYLEEKYEEHLYERDEGDKWRNKKFELGLEFPNLPYYIDGDVKLTQSMAIIRYIADKHNMLGGCPKERAEISMLEGAVLDIRYGVSRIAYSKDFETLKVDFLSKLPEMLKMFEDRLCHKTYLNGDHVTHPDFMLYDALDVVLYMDPMCLDAFPKLVCFKKRIEAIPQIDKYLKSSKYIAWPLQGWQATFGGGDHPPKSGGGGSLEVLFQGPAGYLLGKINLKALAALAKKILGGGGSKIPNIGNVMNKFEILGVVGEGAYGVVLKCRHKETHEIVAIKKFKDSEENEEVKETTLRELKMLRTLKQENIVELKEAFRRRGKLYLVFEYVEKNMLELLEEMPNGVPPEKVKSYIYQLIKAIHWCHKNDIVHRDIKPENLLISHNDVLKLCDFGFARNLSEGNNANYTEYVATRWYRSPELLLGAPYGKSVDMWSVGCILGELSDGQPLFPGESEIDQLFTIQKVLGPLPSEQMKLFYSNPRFHGLRFPAVNHPQSLERRYLGILNSVLLDLMKNLLKLDPADRYLTEQCLNHPTFQTQRLLDRSPSRSAKRKPYHVESSTLSNRNQAGKSTALQSHHRSNSKDIQNLSVGLPRADEGLPANESFLNGNLAGASLSPLHTKTYQASSQPGSTSKDLTNNNIPHLLSPKEAKSKTEFDFNIDPKPSEGPGTKYLKSNSRSQQNRHSFMESSQSKAGTLQPNEKQSRHSYIDTIPQSSRSPSYRTKAKSHGALSDSKSVSNLSEARAQIAEPSTSRYFPSSCLDLNSPTSPTPTRHSDTRTLLSPSGRNNRNEGTLDSRRTTTRHSKTMEELKLPEHMDSSHSHSLSAPHESFSYGLGYTSPFSSQQRPHRHSMYVTRDKVRAKGLDGSLSIGQGMAARANSLQLLSPQPGEQLPPEMTVARSSVKETSREGTSSFHTRQKSEGGVYHDPHSDDGTAPKENRHLYNDPVPRRVGSFYRVPSPRPDNSFHENNVSTRVSSLPSESSSGTNHSKRQPAFDPWKSPENISHSEQLKEKEKQGFFRSMKKKKKKSQTVPNSDSPDLLTLQKSIHSASTPSSRPKEWRPEKISDLQTQSQPLKSLRKLLHLSSASNHPASSDPRFQPLTAQQTKNSFSEIRIHPLSQASGGSSNIRQEPAPKGRPALQLPGQMDPGWHVSSVTRSATEGPSYSEQLGAKSGPNGHPYNRTNRSRMPNLNDLKETALGGGGSLEVLFQGPDYKDHDGDYKDHDIDYKDDDDKDGAPHHHHHH

SEQ ID NO: 89 - protein, 1253 aa, Artificial Sequence
  -GST-P-P97P-CDKL5_107-P-FH_pVL1393 (insect)
MSPILGYWKIKGLVQPTRLLLEYLEEKYEEHLYERDEGDKWRNKKFELGLEFPNLPYYIDGDVKLTQSMAIIRYIADKHNMLGGCPKERAEISMLEGAVLDIRYGVSRIAYSKDFETLKVDFLSKLPEMLKMFEDRLCHKTYLNGDHVTHPDFMLYDALDVVLYMDPMCLDAFPKLVCFKKRIEAIPQIDKYLKSSKYIAWPLQGWQATFGGGDHPPKSGGGGSLEVLFQGPDSSHAFTLDELRGGGGSKIPNIGNVMNKFEILGVVGEGAYGVVLKCRHKETHEIVAIKKFKDSEENEEVKETTLRELKMLRTLKQENIVELKEAFRRRGKLYLVFEYVEKNMLELLEEMPNGVPPEKVKSYIYQLIKAIHWCHKNDIVHRDIKPENLLISHNDVLKLCDFGFARNLSEGNNANYTEYVATRWYRSPELLLGAPYGKSVDMWSVGCILGELSDGQPLFPGESEIDQLFTIQKVLGPLPSEQMKLFYSNPRFHGLRFPAVNHPQSLERRYLGILNSVLLDLMKNLLKLDPADRYLTEQCLNHPTFQTQRLLDRSPSRSAKRKPYHVESSTLSNRNQAGKSTALQSHHRSNSKDIQNLSVGLPRADEGLPANESFLNGNLAGASLSPLHTKTYQASSQPGSTSKDLTNNNIPHLLSPKEAKSKTEFDFNIDPKPSEGPGTKYLKSNSRSQQNRHSFMESSQSKAGTLQPNEKQSRHSYIDTIPQSSRSPSYRTKAKSHGALSDSKSVSNLSEARAQIAEPSTSRYFPSSCLDLNSPTSPTPTRHSDTRTLLSPSGRNNRNEGTLDSRRTTTRHSKTMEELKLPEHMDSSHSHSLSAPHESFSYGLGYTSPFSSQQRPHRHSMYVTRDKVRAKGLDGSLSIGQGMAARANSLQLLSPQPGEQLPPEMTVARSSVKETSREGTSSFHTRQKSEGGVYHDPHSDDGTAPKENRHLYNDPVPRRVGSFYRVPSPRPDNSFHENNVSTRVSSLPSESSSGTNHSKRQPAFDPWKSPENISHSEQLKEKEKQGFFRSMKKKKKKSQTVPNSDSPDLLTLQKSIHSASTPSSRPKEWRPEKISDLQTQSQPLKSLRKLLHLSSASNHPASSDPRFQPLTAQQTKNSFSEIRIHPLSQASGGSSNIRQEPAPKGRPALQLPGQMDPGWHVSSVTRSATEGPSYSEQLGAKSGPNGHPYNRTNRSRMPNLNDLKETALGGGGSLEVLFQGPDYKDHDGDYKDHDIDYKDDDDKDGAPHHHHHH

SEQ ID NO: 90 - protein, 516 aa, Artificial Sequence
  -GST-P-eGFP-P-FH_pVL1393 (insect)
MSPILGYWKIKGLVQPTRLLLEYLEEKYEEHLYERDEGDKWRNKKFELGLEFPNLPYYIDGDVKLTQSMAIIRYIADKHNMLGGCPKERAEISMLEGAVLDIRYGVSRIAYSKDFETLKVDFLSKLPEMLKMFEDRLCHKTYLNGDHVTHPDFMLYDALDVVLYMDPMCLDAFPKLVCFKKRIEAIPQIDKYLKSSKYIAWPLQGWQATFGGGDHPPKSGGGGSLEVLFQGPMVSKGEELFTGVVPILVELDGDVNGHKFSVSGEGEGDATYGKLTLKFICTTGKLPVPWPTLVTTLTYGVQCFSRYPDHMKQHDFFKSAMPEGYVQERTIFFKDDGNYKTRAEVKFEGDTLVNRIELKGIDFKEDGNILGHKLEYNYNSHNVYIMADKQKNGIKVNFKIRHNIEDGSVQLADHYQQNTPIGDGPVLLPDNHYLSTQSALSKDPNEKRDHMVLLEFVTAAGITLGMDELYKGGGGSLEVLFQGPDYKDHDGDYKDHDIDYKDDDDKDGAPHHHHHH

SEQ ID NO: 91 - protein, 548 aa, Artificial Sequence
  -GST-P-TATkappa28-eGFP-P-FH_pVL1393 (insect)
MSPILGYWKIKGLVQPTRLLLEYLEEKYEEHLYERDEGDKWRNKKFELGLEFPNLPYYIDGDVKLTQSMAIIRYIADKHNMLGGCPKERAEISMLEGAVLDIRYGVSRIAYSKDFETLKVDFLSKLPEMLKMFEDRLCHKTYLNGDHVTHPDFMLYDALDVVLYMDPMCLDAFPKLVCFKKRIEAIPQIDKYLKSSKYIAWPLQGWQATFGGGDHPPKSGGGGSLEVLFQGPDAAQPARRARRTKLAAYARKAARQARAGGGGSMVSKGEELFTGVVPILVELDGDVNGHKFSVSGEGEGDATYGKLTLKFICTTGKLPVPWPTLVTTLTYGVQCFSRYPDHMKQHDFFKSAMPEGYVQERTIFFKDDGNYKTRAEVKFEGDTLVNRIELKGIDFKEDGNILGHKLEYNYNSHNVYIMADKQKNGIKVNFKIRHNIEDGSVQLADHYQQNTPIGDGPVLLPDNHYLSTQSALSKDPNEKRDHMVLLEFVTAAGITLGMDELYKGGGGSLEVLFQGPDYKDHDGDYKDHDIDYKDDDDKDGAPHHHHHH

SEQ ID NO: 92 - protein, 1237 aa, Artificial Sequence
  -GST-P-CDKL5_107-P-FH_pVL1393 (insect)
MSPILGYWKIKGLVQPTRLLLEYLEEKYEEHLYERDEGDKWRNKKFELGLEFPNLPYYIDGDVKLTQSMAIIRYIADKHNMLGGCPKERAEISMLEGAVLDIRYGVSRIAYSKDFETLKVDFLSKLPEMLKMFEDRLCHKTYLNGDHVTHPDFMLYDALDVVLYMDPMCLDAFPKLVCFKKRIEAIPQIDKYLKSSKYIAWPLQGWQATFGGGDHPPKSGGGGSLEVLFQGPGKIPNIGNVMNKFEILGVVGEGAYGVVLKCRHKETHEIVAIKKFKDSEENEEVKETTLRELKMLRTLKQENIVELKEAFRRRGKLYLVFEYVEKNMLELLEEMPNGVPPEKVKSYIYQLIKAIHWCHKNDIVHRDIKPENLLISHNDVLKLCDFGFARNLSEGNNANYTEYVATRWYRSPELLLGAPYGKSVDMWSVGCILGELSDGQPLFPGESEIDQLFTIQKVLGPLPSEQMKLFYSNPRFHGLRFPAVNHPQSLERRYLGILNSVLLDLMKNLLKLDPADRYLTEQCLNHPTFQTQRLLDRSPSRSAKRKPYHVESSTLSNRNQAGKSTALQSHHRSNSKDIQNLSVGLPRADEGLPANESFLNGNLAGASLSPLHTKTYQASSQPGSTSKDLTNNNIPHLLSPKEAKSKTEFDFNIDPKPSEGPGTKYLKSNSRSQQNRHSFMESSQSKAGTLQPNEKQSRHSYIDTIPQSSRSPSYRTKAKSHGALSDSKSVSNLSEARAQIAEPSTSRYFPSSCLDLNSPTSPTPTRHSDTRTLLSPSGRNNRNEGTLDSRRTTTRHSKTMEELKLPEHMDSSHSHSLSAPHESFSYGLGYTSPFSSQQRPHRHSMYVTRDKVRAKGLDGSLSIGQGMAARANSLQLLSPQPGEQLPPEMTVARSSVKETSREGTSSFHTRQKSEGGVYHDPHSDDGTAPKENRHLYNDPVPRRVGSFYRVPSPRPDNSFHENNVSTRVSSLPSESSSGTNHSKRQPAFDPWKSPENISHSEQLKEKEKQGFFRSMKKKKKKSQTVPNSDSPDLLTLQKSIHSASTPSSRPKEWRPEKISDLQTQSQPLKSLRKLLHLSSASNHPASSDPRFQPLTAQQTKNSFSEIRIHPLSQASGGSSNIRQEPAPKGRPALQLPGQMDPGWHVSSVTRSATEGPSYSEQLGAKSGPNGHPYNRTNRSRMPNLNDLKETALGGGGSLEVLFQGPDYKDHDGDYKDHDIDYKDDDDKDGAPHHHHHH

SEQ ID NO: 93 - protein, 1064 aa, Artificial Sequence
  MBip-TATkappa28-CDKL5_107-FH_cho[1-7NQ]
MKLSLVAAMLLLLSLVAAMLLLLSAARAGDAAQPARRARRTKLAAYARKAARQARAGGGGSKIPNIGNVMNKFEILGVVGEGAYGVVLKCRHKETHEIVAIKKFKDSEENEEVKETTLRELKMLRTLKQENIVELKEAFRRRGKLYLVFEYVEKNMLELLEEMPNGVPPEKVKSYIYQLIKAIHWCHKNDIVHRDIKPENLLISHNDVLKLCDFGFARQLSEGNNAQYTEYVATRWYRSPELLLGAPYGKSVDMWSVGCILGELSDGQPLFPGESEIDQLFTIQKVLGPLPSEQMKLFYSNPRFHGLRFPAVNHPQSLERRYLGILNSVLLDLMKNLLKLDPADRYLTEQCLNHPTFQTQRLLDRSPSRSAKRKPYHVESSTLSNRNQAGKSTALQSHHRSNSKDIQQLSVGLPRADEGLPANESFLNGNLAGASLSPLHTKTYQASSQPGSTSKDLTNNNIPHLLSPKEAKSKTEFDFNIDPKPSEGPGTKYLKSNSRSQQNRHSFMESSQSKAGTLQPNEKQSRHSYIDTIPQSSRSPSYRTKAKSHGALSDSKSVSQLSEARAQIAEPSTSRYFPSSCLDLNSPTSPTPTRHSDTRTLLSPSGRNNRNEGTLDSRRTTTRHSKTMEELKLPEHMDSSHSHSLSAPHESFSYGLGYTSPFSSQQRPHRHSMYVTRDKVRAKGLDGSLSIGQGMAARANSLQLLSPQPGEQLPPEMTVARSSVKETSREGTSSFHTRQKSEGGVYHDPHSDDGTAPKENRHLYNDPVPRRVGSFYRVPSPRPDNSFHENNVSTRVSSLPSESSSGTNHSKRQPAFDPWKSPEQISHSEQLKEKEKQGFFRSMKKKKKKSQTVPNSDSPDLLTLQKSIHSASTPSSRPKEWRPEKISDLQTQSQPLKSLRKLLHLSSASNHPASSDPRFQPLTAQQTKNSFSEIRIHPLSQASGGSSNIRQEPAPKGRPALQLPGQMDPGWHVSSVTRSATEGPSYSEQLGAKSGPNGHPYQRTQRSRMPNLNDLKETALGGGGSENLYFQGDYKDHDGDYKDHDIDYKDDDDKDGAPHHHHHH

SEQ ID NO: 94 - protein, 1064 aa, Artificial Sequence
  MBip-TATkappa28-CDKL5_107-FH_cho[2-7NQ]
MKLSLVAAMLLLLSLVAAMLLLLSAARAGDAAQPARRARRTKLAAYARKAARQARAGGGGSKIPNIGNVMNKFEILGVVGEGAYGVVLKCRHKETHEIVAIKKFKDSEENEEVKETTLRELKMLRTLKQENIVELKEAFRRRGKLYLVFEYVEKNMLELLEEMPNGVPPEKVKSYIYQLIKAIHWCHKNDIVHRDIKPENLLISHNDVLKLCDFGFARNLSEGNNAQYTEYVATRWYRSPELLLGAPYGKSVDMWSVGCILGELSDGQPLFPGESEIDQLFTIQKVLGPLPSEQMKLFYSNPRFHGLRFPAVNHPQSLERRYLGILNSVLLDLMKNLLKLDPADRYLTEQCLNHPTFQTQRLLDRSPSRSAKRKPYHVESSTLSNRNQAGKSTALQSHHRSNSKDIQQLSVGLPRADEGLPANESFLNGNLAGASLSPLHTKTYQASSQPGSTSKDLTNNNIPHLLSPKEAKSKTEFDFNIDPKPSEGPGTKYLKSNSRSQQNRHSFMESSQSKAGTLQPNEKQSRHSYIDTIPQSSRSPSYRTKAKSHGALSDSKSVSQLSEARAQIAEPSTSRYFPSSCLDLNSPTSPTPTRHSDTRTLLSPSGRNNRNEGTLDSRRTTTRHSKTMEELKLPEHMDSSHSHSLSAPHESFSYGLGYTSPFSSQQRPHRHSMYVTRDKVRAKGLDGSLSIGQGMAARANSLQLLSPQPGEQLPPEMTVARSSVKETSREGTSSFHTRQKSEGGVYHDPHSDDGTAPKENRHLYNDPVPRRVGSFYRVPSPRPDNSFHENNVSTRVSSLPSESSSGTNHSKRQPAFDPWKSPEQISHSEQLKEKEKQGFFRSMKKKKKKSQTVPNSDSPDLLTLQKSIHSASTPSSRPKEWRPEKISDLQTQSQPLKSLRKLLHLSSASNHPASSDPRFQPLTAQQTKNSFSEIRIHPLSQASGGSSNIRQEPAPKGRPALQLPGQMDPGWHVSSVTRSATEGPSYSEQLGAKSGPNGHPYQRTQRSRMPNLNDLKETALGGGGSENLYFQGDYKDHDGDYKDHDIDYKDDDDKDGAPHHHHHH

SEQ ID NO: 95 - protein, 1064 aa, Artificial Sequence
  MBip-TATkappa28-CDKL5_107-FH_cho[1,3-7NQ]
MKLSLVAAMLLLLSLVAAMLLLLSAARAGDAAQPARRARRTKLAAYARKAARQARAGGGGSKIPNIGNVMNKFEILGVVGEGAYGVVLKCRHKETHEIVAIKKFKDSEENEEVKETTLRELKMLRTLKQENIVELKEAFRRRGKLYLVFEYVEKNMLELLEEMPNGVPPEKVKSYIYQLIKAIHWCHKNDIVHRDIKPENLLISHNDVLKLCDFGFARQLSEGNNANYTEYVATRWYRSPELLLGAPYGKSVDMWSVGCILGELSDGQPLFPGESEIDQLFTIQKVLGPLPSEQMKLFYSNPRFHGLRFPAVNHPQSLERRYLGILNSVLLDLMKNLLKLDPADRYLTEQCLNHPTFQTQRLLDRSPSRSAKRKPYHVESSTLSNRNQAGKSTALQSHHRSNSKDIQQLSVGLPRADEGLPANESFLNGNLAGASLSPLHTKTYQASSQPGSTSKDLTNNNIPHLLSPKEAKSKTEFDFNIDPKPSEGPGTKYLKSNSRSQQNRHSFMESSQSKAGTLQPNEKQSRHSYIDTIPQSSRSPSYRTKAKSHGALSDSKSVSQLSEARAQIAEPSTSRYFPSSCLDLNSPTSPTPTRHSDTRTLLSPSGRNNRNEGTLDSRRTTTRHSKTMEELKLPEHMDSSHSHSLSAPHESFSYGLGYTSPFSSQQRPHRHSMYVTRDKVRAKGLDGSLSIGQGMAARANSLQLLSPQPGEQLPPEMTVARSSVKETSREGTSSFHTRQKSEGGVYHDPHSDDGTAPKENRHLYNDPVPRRVGSFYRVPSPRPDNSFHENNVSTRVSSLPSESSSGTNHSKRQPAFDPWKSPEQISHSEQLKEKEKQGFFRSMKKKKKKSQTVPNSDSPDLLTLQKSIHSASTPSSRPKEWRPEKISDLQTQSQPLKSLRKLLHLSSASNHPASSDPRFQPLTAQQTKNSFSEIRIHPLSQASGGSSNIRQEPAPKGRPALQLPGQMDPGWHVSSVTRSATEGPSYSEQLGAKSGPNGHPYQRTQRSRMPNLNDLKETALGGGGSENLYFQGDYKDHDGDYKDHDIDYKDDDDKDGAPHHHHHH

SEQ ID NO: 96 - protein, 1064 aa, Artificial Sequence
  MBip-TATkappa28-CDKL5_107-FH_cho[1-2,4-7NQ]
MKLSLVAAMLLLLSLVAAMLLLLSAARAGDAAQPARRARRTKLAAYARKAARQARAGGGGSKIPNIGNVMNKFEILGVVGEGAYGVVLKCRHKETHEIVAIKKFKDSEENEEVKETTLRELKMLRTLKQENIVELKEAFRRRGKLYLVFEYVEKNMLELLEEMPNGVPPEKVKSYIYQLIKAIHWCHKNDIVHRDIKPENLLISHNDVLKLCDFGFARQLSEGNNAQYTEYVATRWYRSPELLLGAPYGKSVDMWSVGCILGELSDGQPLFPGESEIDQLFTIQKVLGPLPSEQMKLFYSNPRFHGLRFPAVNHPQSLERRYLGILNSVLLDLMKNLLKLDPADRYLTEQCLNHPTFQTQRLLDRSPSRSAKRKPYHVESSTLSNRNQAGKSTALQSHHRSNSKDIQNLSVGLPRADEGLPANESFLNGNLAGASLSPLHTKTYQASSQPGSTSKDLTNNNIPHLLSPKEAKSKTEFDFNIDPKPSEGPGTKYLKSNSRSQQNRHSFMESSQSKAGTLQPNEKQSRHSYIDTIPQSSRSPSYRTKAKSHGALSDSKSVSQLSEARAQIAEPSTSRYFPSSCLDLNSPTSPTPTRHSDTRTLLSPSGRNNRNEGTLDSRRTTTRHSKTMEELKLPEHMDSSHSHSLSAPHESFSYGLGYTSPFSSQQRPHRHSMYVTRDKVRAKGLDGSLSIGQGMAARANSLQLLSPQPGEQLPPEMTVARSSVKETSREGTSSFHTRQKSEGGVYHDPHSDDGTAPKENRHLYNDPVPRRVGSFYRVPSPRPDNSFHENNVSTRVSSLPSESSSGTNHSKRQPAFDPWKSPEQISHSEQLKEKEKQGFFRSMKKKKKKSQTVPNSDSPDLLTLQKSIHSASTPSSRPKEWRPEKISDLQTQSQPLKSLRKLLHLSSASNHPASSDPRFQPLTAQQTKNSFSEIRIHPLSQASGGSSNIRQEPAPKGRPALQLPGQMDPGWHVSSVTRSATEGPSYSEQLGAKSGPNGHPYQRTQRSRMPNLNDLKETALGGGGSENLYFQGDYKDHDGDYKDHDIDYKDDDDKDGAPHHHHHH

SEQ ID NO: 97 - protein, 1064 aa, Artificial Sequence
  MBip-TATkappa28-CDKL5_107-FH_cho[1-3,5-7NQ]
MKLSLVAAMLLLLSLVAAMLLLLSAARAGDAAQPARRARRTKLAAYARKAARQARAGGGGSKIPNIGNVMNKFEILGVVGEGAYGVVLKCRHKETHEIVAIKKFKDSEENEEVKETTLRELKMLRTLKQENIVELKEAFRRRGKLYLVFEYVEKNMLELLEEMPNGVPPEKVKSYIYQLIKAIHWCHKNDIVHRDIKPENLLISHNDVLKLCDFGFARQLSEGNNAQYTEYVATRWYRSPELLLGAPYGKSVDMWSVGCILGELSDGQPLFPGESEIDQLFTIQKVLGPLPSEQMKLFYSNPRFHGLRFPAVNHPQSLERRYLGILNSVLLDLMKNLLKLDPADRYLTEQCLNHPTFQTQRLLDRSPSRSAKRKPYHVESSTLSNRNQAGKSTALQSHHRSNSKDIQQLSVGLPRADEGLPANESFLNGNLAGASLSPLHTKTYQASSQPGSTSKDLTNNNIPHLLSPKEAKSKTEFDFNIDPKPSEGPGTKYLKSNSRSQQNRHSFMESSQSKAGTLQPNEKQSRHSYIDTIPQSSRSPSYRTKAKSHGALSDSKSVSNLSEARAQIAEPSTSRYFPSSCLDLNSPTSPTPTRHSDTRTLLSPSGRNNRNEGTLDSRRTTTRHSKTMEELKLPEHMDSSHSHSLSAPHESFSYGLGYTSPFSSQQRPHRHSMYVTRDKVRAKGLDGSLSIGQGMAARANSLQLLSPQPGEQLPPEMTVARSSVKETSREGTSSFHTRQKSEGGVYHDPHSDDGTAPKENRHLYNDPVPRRVGSFYRVPSPRPDNSFHENNVSTRVSSLPSESSSGTNHSKRQPAFDPWKSPEQISHSEQLKEKEKQGFFRSMKKKKKKSQTVPNSDSPDLLTLQKSIHSASTPSSRPKEWRPEKISDLQTQSQPLKSLRKLLHLSSASNHPASSDPRFQPLTAQQTKNSFSEIRIHPLSQASGGSSNIRQEPAPKGRPALQLPGQMDPGWHVSSVTRSATEGPSYSEQLGAKSGPNGHPYQRTQRSRMPNLNDLKETALGGGGSENLYFQGDYKDHDGDYKDHDIDYKDDDDKDGAPHHHHHH

SEQ ID NO: 98 - protein, 1064 aa, Artificial Sequence
  MBip-TATkappa28-CDKL5_107-FH_cho[1-4,6-7NQ]
MKLSLVAAMLLLLSLVAAMLLLLSAARAGDAAQPARRARRTKLAAYARKAARQARAGGGGSKIPNIGNVMNKFEILGVVGEGAYGVVLKCRHKETHEIVAIKKFKDSEENEEVKETTLRELKMLRTLKQENIVELKEAFRRRGKLYLVFEYVEKNMLELLEEMPNGVPPEKVKSYIYQLIKAIHWCHKNDIVHRDIKPENLLISHNDVLKLCDFGFARQLSEGNNAQYTEYVATRWYRSPELLLGAPYGKSVDMWSVGCILGELSDGQPLFPGESEIDQLFTIQKVLGPLPSEQMKLFYSNPRFHGLRFPAVNHPQSLERRYLGILNSVLLDLMKNLLKLDPADRYLTEQCLNHPTFQTQRLLDRSPSRSAKRKPYHVESSTLSNRNQAGKSTALQSHHRSNSKDIQQLSVGLPRADEGLPANESFLNGNLAGASLSPLHTKTYQASSQPGSTSKDLTNNNIPHLLSPKEAKSKTEFDFNIDPKPSEGPGTKYLKSNSRSQQNRHSFMESSQSKAGTLQPNEKQSRHSYIDTIPQSSRSPSYRTKAKSHGALSDSKSVSQLSEARAQIAEPSTSRYFPSSCLDLNSPTSPTPTRHSDTRTLLSPSGRNNRNEGTLDSRRTTTRHSKTMEELKLPEHMDSSHSHSLSAPHESFSYGLGYTSPFSSQQRPHRHSMYVTRDKVRAKGLDGSLSIGQGMAARANSLQLLSPQPGEQLPPEMTVARSSVKETSREGTSSFHTRQKSEGGVYHDPHSDDGTAPKENRHLYNDPVPRRVGSFYRVPSPRPDNSFHENNVSTRVSSLPSESSSGTNHSKRQPAFDPWKSPENISHSEQLKEKEKQGFFRSMKKKKKKSQTVPNSDSPDLLTLQKSIHSASTPSSRPKEWRPEKISDLQTQSQPLKSLRKLLHLSSASNHPASSDPRFQPLTAQQTKNSFSEIRIHPLSQASGGSSNIRQEPAPKGRPALQLPGQMDPGWHVSSVTRSATEGPSYSEQLGAKSGPNGHPYQRTQRSRMPNLNDLKETALGGGGSENLYFQGDYKDHDGDYKDHDIDYKDDDDKDGAPHHHHHH

SEQ ID NO: 99 - protein, 1064 aa, Artificial Sequence
  MBip-TATkappa28-CDKL5_107-FH_cho[1-5,7NQ]
MKLSLVAAMLLLLSLVAAMLLLLSAARAGDAAQPARRARRTKLAAYARKAARQARAGGGGSKIPNIGNVMNKFEILGVVGEGAYGVVLKCRHKETHEIVAIKKFKDSEENEEVKETTLRELKMLRTLKQENIVELKEAFRRRGKLYLVFEYVEKNMLELLEEMPNGVPPEKVKSYIYQLIKAIHWCHKNDIVHRDIKPENLLISHNDVLKLCDFGFARQLSEGNNAQYTEYVATRWYRSPELLLGAPYGKSVDMWSVGCILGELSDGQPLFPGESEIDQLFTIQKVLGPLPSEQMKLFYSNPRFHGLRFPAVNHPQSLERRYLGILNSVLLDLMKNLLKLDPADRYLTEQCLNHPTFQTQRLLDRSPSRSAKRKPYHVESSTLSNRNQAGKSTALQSHHRSNSKDIQQLSVGLPRADEGLPANESFLNGNLAGASLSPLHTKTYQASSQPGSTSKDLTNNNIPHLLSPKEAKSKTEFDFNIDPKPSEGPGTKYLKSNSRSQQNRHSFMESSQSKAGTLQPNEKQSRHSYIDTIPQSSRSPSYRTKAKSHGALSDSKSVSQLSEARAQIAEPSTSRYFPSSCLDLNSPTSPTPTRHSDTRTLLSPSGRNNRNEGTLDSRRTTTRHSKTMEELKLPEHMDSSHSHSLSAPHESFSYGLGYTSPFSSQQRPHRHSMYVTRDKVRAKGLDGSLSIGQGMAARANSLQLLSPQPGEQLPPEMTVARSSVKETSREGTSSFHTRQKSEGGVYHDPHSDDGTAPKENRHLYNDPVPRRVGSFYRVPSPRPDNSFHENNVSTRVSSLPSESSSGTNHSKRQPAFDPWKSPEQISHSEQLKEKEKQGFFRSMKKKKKKSQTVPNSDSPDLLTLQKSIHSASTPSSRPKEWRPEKISDLQTQSQPLKSLRKLLHLSSASNHPASSDPRFQPLTAQQTKNSFSEIRIHPLSQASGGSSNIRQEPAPKGRPALQLPGQMDPGWHVSSVTRSATEGPSYSEQLGAKSGPNGHPYNRTQRSRMPNLNDLKETALGGGGSENLYFQGDYKDHDGDYKDHDIDYKDDDDKDGAPHHHHHH

SEQ ID NO: 100 - protein, 1064 aa, Artificial Sequence
  MBip-TATkappa28-CDKL5_107-FH_cho[1-6NQ]
MKLSLVAAMLLLLSLVAAMLLLLSAARAGDAAQPARRARRTKLAAYARKAARQARAGGGGSKIPNIGNVMNKFEILGVVGEGAYGVVLKCRHKETHEIVAIKKFKDSEENEEVKETTLRELKMLRTLKQENIVELKEAFRRRGKLYLVFEYVEKNMLELLEEMPNGVPPEKVKSYIYQLIKAIHWCHKNDIVHRDIKPENLLISHNDVLKLCDFGFARQLSEGNNAQYTEYVATRWYRSPELLLGAPYGKSVDMWSVGCILGELSDGQPLFPGESEIDQLFTIQKVLGPLPSEQMKLFYSNPRFHGLRFPAVNHPQSLERRYLGILNSVLLDLMKNLLKLDPADRYLTEQCLNHPTFQTQRLLDRSPSRSAKRKPYHVESSTLSNRNQAGKSTALQSHHRSNSKDIQQLSVGLPRADEGLPANESFLNGNLAGASLSPLHTKTYQASSQPGSTSKDLTNNNIPHLLSPKEAKSKTEFDFNIDPKPSEGPGTKYLKSNSRSQQNRHSFMESSQSKAGTLQPNEKQSRHSYIDTIPQSSRSPSYRTKAKSHGALSDSKSVSQLSEARAQIAEPSTSRYFPSSCLDLNSPTSPTPTRHSDTRTLLSPSGRNNRNEGTLDSRRTTTRHSKTMEELKLPEHMDSSHSHSLSAPHESFSYGLGYTSPFSSQQRPHRHSMYVTRDKVRAKGLDGSLSIGQGMAARANSLQLLSPQPGEQLPPEMTVARSSVKETSREGTSSFHTRQKSEGGVYHDPHSDDGTAPKENRHLYNDPVPRRVGSFYRVPSPRPDNSFHENNVSTRVSSLPSESSSGTNHSKRQPAFDPWKSPEQISHSEQLKEKEKQGFFRSMKKKKKKSQTVPNSDSPDLLTLQKSIHSASTPSSRPKEWRPEKISDLQTQSQPLKSLRKLLHLSSASNHPASSDPRFQPLTAQQTKNSFSEIRIHPLSQASGGSSNIRQEPAPKGRPALQLPGQMDPGWHVSSVTRSATEGPSYSEQLGAKSGPNGHPYQRTNRSRMPNLNDLKETALGGGGSENLYFQGDYKDHDGDYKDHDIDYKDDDDKDGAPHHHHHH

SEQ ID NO: 101 - protein, 1064 aa, Artificial Sequence
  MBip-TATkappa28-CDKL5_107-FH_cho[2NQ]
MKLSLVAAMLLLLSLVAAMLLLLSAARAGDAAQPARRARRTKLAAYARKAARQARAGGGGSKIPNIGNVMNKFEILGVVGEGAYGVVLKCRHKETHEIVAIKKFKDSEENEEVKETTLRELKMLRTLKQENIVELKEAFRRRGKLYLVFEYVEKNMLELLEEMPNGVPPEKVKSYIYQLIKAIHWCHKNDIVHRDIKPENLLISHNDVLKLCDFGFARNLSEGNNAQYTEYVATRWYRSPELLLGAPYGKSVDMWSVGCILGELSDGQPLFPGESEIDQLFTIQKVLGPLPSEQMKLFYSNPRFHGLRFPAVNHPQSLERRYLGILNSVLLDLMKNLLKLDPADRYLTEQCLNHPTFQTQRLLDRSPSRSAKRKPYHVESSTLSNRNQAGKSTALQSHHRSNSKDIQNLSVGLPRADEGLPANESFLNGNLAGASLSPLHTKTYQASSQPGSTSKDLTNNNIPHLLSPKEAKSKTEFDFNIDPKPSEGPGTKYLKSNSRSQQNRHSFMESSQSKAGTLQPNEKQSRHSYIDTIPQSSRSPSYRTKAKSHGALSDSKSVSNLSEARAQIAEPSTSRYFPSSCLDLNSPTSPTPTRHSDTRTLLSPSGRNNRNEGTLDSRRTTTRHSKTMEELKLPEHMDSSHSHSLSAPHESFSYGLGYTSPFSSQQRPHRHSMYVTRDKVRAKGLDGSLSIGQGMAARANSLQLLSPQPGEQLPPEMTVARSSVKETSREGTSSFHTRQKSEGGVYHDPHSDDGTAPKENRHLYNDPVPRRVGSFYRVPSPRPDNSFHENNVSTRVSSLPSESSSGTNHSKRQPAFDPWKSPENISHSEQLKEKEKQGFFRSMKKKKKKSQTVPNSDSPDLLTLQKSIHSASTPSSRPKEWRPEKISDLQTQSQPLKSLRKLLHLSSASNHPASSDPRFQPLTAQQTKNSFSEIRIHPLSQASGGSSNIRQEPAPKGRPALQLPGQMDPGWHVSSVTRSATEGPSYSEQLGAKSGPNGHPYNRTNRSRMPNLNDLKETALGGGGSENLYFQGDYKDHDGDYKDHDIDYKDDDDKDGAPHHHHHH

SEQ ID NO: 102 - protein, 1064 aa, Artificial Sequence
  MBip-TATkappa28-CDKL5_107-FH_cho[1-10NQ]
MKLSLVAAMLLLLSLVAAMLLLLSAARAGDAAQPARRARRTKLAAYARKAARQARAGGGGSKIPNIGNVMNKFEILGVVGEGAYGVVLKCRHKETHEIVAIKKFKDSEENEEVKETTLRELKMLRTLKQENIVELKEAFRRRGKLYLVFEYVEKNMLELLEEMPNGVPPEKVKSYIYQLIKAIHWCHKNDIVHRDIKPENLLISHNDVLKLCDFGFARQLSEGNNAQYTEYVATRWYRSPELLLGAPYGKSVDMWSVGCILGELSDGQPLFPGESEIDQLFTIQKVLGPLPSEQMKLFYSNPRFHGLRFPAVNHPQSLERRYLGILNSVLLDLMKNLLKLDPADRYLTEQCLNHPTFQTQRLLDRSPSRSAKRKPYHVESSTLSNRNQAGKSTALQSHHRSNSKDIQQLSVGLPRADEGLPAQESFLNGNLAGASLSPLHTKTYQASSQPGSTSKDLTNNNIPHLLSPKEAKSKTEFDFNIDPKPSEGPGTKYLKSNSRSQQNRHSFMESSQSKAGTLQPNEKQSRHSYIDTIPQSSRSPSYRTKAKSHGALSDSKSVSQLSEARAQIAEPSTSRYFPSSCLDLNSPTSPTPTRHSDTRTLLSPSGRNNRNEGTLDSRRTTTRHSKTMEELKLPEHMDSSHSHSLSAPHESFSYGLGYTSPFSSQQRPHRHSMYVTRDKVRAKGLDGSLSIGQGMAARANSLQLLSPQPGEQLPPEMTVARSSVKETSREGTSSFHTRQKSEGGVYHDPHSDDGTAPKENRHLYNDPVPRRVGSFYRVPSPRPDNSFHENQVSTRVSSLPSESSSGTQHSKRQPAFDPWKSPEQISHSEQLKEKEKQGFFRSMKKKKKKSQTVPNSDSPDLLTLQKSIHSASTPSSRPKEWRPEKISDLQTQSQPLKSLRKLLHLSSASNHPASSDPRFQPLTAQQTKNSFSEIRIHPLSQASGGSSNIRQEPAPKGRPALQLPGQMDPGWHVSSVTRSATEGPSYSEQLGAKSGPNGHPYQRTQRSRMPNLNDLKETALGGGGSENLYFQGDYKDHDGDYKDHDIDYKDDDDKDGAPHHHHHH

SEQ ID NO: 103 - protein, 1064 aa, Artificial Sequence
  MBip-TATkappa28-CDKL5_107-FH_cho[1-7,9-10NQ]
MKLSLVAAMLLLLSLVAAMLLLLSAARAGDAAQPARRARRTKLAAYARKAARQARAGGGGSKIPNIGNVMNKFEILGVVGEGAYGVVLKCRHKETHEIVAIKKFKDSEENEEVKETTLRELKMLRTLKQENIVELKEAFRRRGKLYLVFEYVEKNMLELLEEMPNGVPPEKVKSYIYQLIKAIHWCHKNDIVHRDIKPENLLISHNDVLKLCDFGFARQLSEGNNAQYTEYVATRWYRSPELLLGAPYGKSVDMWSVGCILGELSDGQPLFPGESEIDQLFTIQKVLGPLPSEQMKLFYSNPRFHGLRFPAVNHPQSLERRYLGILNSVLLDLMKNLLKLDPADRYLTEQCLNHPTFQTQRLLDRSPSRSAKRKPYHVESSTLSNRNQAGKSTALQSHHRSNSKDIQQLSVGLPRADEGLPANESFLNGNLAGASLSPLHTKTYQASSQPGSTSKDLTNNNIPHLLSPKEAKSKTEFDFNIDPKPSEGPGTKYLKSNSRSQQNRHSFMESSQSKAGTLQPNEKQSRHSYIDTIPQSSRSPSYRTKAKSHGALSDSKSVSQLSEARAQIAEPSTSRYFPSSCLDLNSPTSPTPTRHSDTRTLLSPSGRNNRNEGTLDSRRTTTRHSKTMEELKLPEHMDSSHSHSLSAPHESFSYGLGYTSPFSSQQRPHRHSMYVTRDKVRAKGLDGSLSIGQGMAARANSLQLLSPQPGEQLPPEMTVARSSVKETSREGTSSFHTRQKSEGGVYHDPHSDDGTAPKENRHLYNDPVPRRVGSFYRVPSPRPDNSFHENQVSTRVSSLPSESSSGTQHSKRQPAFDPWKSPEQISHSEQLKEKEKQGFFRSMKKKKKKSQTVPNSDSPDLLTLQKSIHSASTPSSRPKEWRPEKISDLQTQSQPLKSLRKLLHLSSASNHPASSDPRFQPLTAQQTKNSFSEIRIHPLSQASGGSSNIRQEPAPKGRPALQLPGQMDPGWHVSSVTRSATEGPSYSEQLGAKSGPNGHPYQRTQRSRMPNLNDLKETALGGGGSENLYFQGDYKDHDGDYKDHDIDYKDDDDKDGAPHHHHHH

SEQ ID NO: 104 - protein, 1064 aa, Artificial Sequence
  MBip-TATkappa28-CDKL5_107-FH_cho[1-8,10NQ]
MKLSLVAAMLLLLSLVAAMLLLLSAARAGDAAQPARRARRTKLAAYARKAARQARAGGGGSKIPNIGNVMNKFEILGVVGEGAYGVVLKCRHKETHEIVAIKKFKDSEENEEVKETTLRELKMLRTLKQENIVELKEAFRRRGKLYLVFEYVEKNMLELLEEMPNGVPPEKVKSYIYQLIKAIHWCHKNDIVHRDIKPENLLISHNDVLKLCDFGFARQLSEGNNAQYTEYVATRWYRSPELLLGAPYGKSVDMWSVGCILGELSDGQPLFPGESEIDQLFTIQKVLGPLPSEQMKLFYSNPRFHGLRFPAVNHPQSLERRYLGILNSVLLDLMKNLLKLDPADRYLTEQCLNHPTFQTQRLLDRSPSRSAKRKPYHVESSTLSNRNQAGKSTALQSHHRSNSKDIQQLSVGLPRADEGLPAQESFLNGNLAGASLSPLHTKTYQASSQPGSTSKDLTNNNIPHLLSPKEAKSKTEFDFNIDPKPSEGPGTKYLKSNSRSQQNRHSFMESSQSKAGTLQPNEKQSRHSYIDTIPQSSRSPSYRTKAKSHGALSDSKSVSQLSEARAQIAEPSTSRYFPSSCLDLNSPTSPTPTRHSDTRTLLSPSGRNNRNEGTLDSRRTTTRHSKTMEELKLPEHMDSSHSHSLSAPHESFSYGLGYTSPFSSQQRPHRHSMYVTRDKVRAKGLDGSLSIGQGMAARANSLQLLSPQPGEQLPPEMTVARSSVKETSREGTSSFHTRQKSEGGVYHDPHSDDGTAPKENRHLYNDPVPRRVGSFYRVPSPRPDNSFHENNVSTRVSSLPSESSSGTQHSKRQPAFDPWKSPEQISHSEQLKEKEKQGFFRSMKKKKKKSQTVPNSDSPDLLTLQKSIHSASTPSSRPKEWRPEKISDLQTQSQPLKSLRKLLHLSSASNHPASSDPRFQPLTAQQTKNSFSEIRIHPLSQASGGSSNIRQEPAPKGRPALQLPGQMDPGWHVSSVTRSATEGPSYSEQLGAKSGPNGHPYQRTQRSRMPNLNDLKETALGGGGSENLYFQGDYKDHDGDYKDHDIDYKDDDDKDGAPHHHHHH

SEQ ID NO: 105 - protein, 1064 aa, Artificial Sequence
  MBip-TATkappa28-CDKL5_107-FH_cho[1-9NQ]
MKLSLVAAMLLLLSLVAAMLLLLSAARAGDAAQPARRARRTKLAAYARKAARQARAGGGGSKIPNIGNVMNKFEILGVVGEGAYGVVLKCRHKETHEIVAIKKFKDSEENEEVKETTLRELKMLRTLKQENIVELKEAFRRRGKLYLVFEYVEKNMLELLEEMPNGVPPEKVKSYIYQLIKAIHWCHKNDIVHRDIKPENLLISHNDVLKLCDFGFARQLSEGNNAQYTEYVATRWYRSPELLLGAPYGKSVDMWSVGCILGELSDGQPLFPGESEIDQLFTIQKVLGPLPSEQMKLFYSNPRFHGLRFPAVNHPQSLERRYLGILNSVLLDLMKNLLKLDPADRYLTEQCLNHPTFQTQRLLDRSPSRSAKRKPYHVESSTLSNRNQAGKSTALQSHHRSNSKDIQQLSVGLPRADEGLPAQESFLNGNLAGASLSPLHTKTYQASSQPGSTSKDLTNNNIPHLLSPKEAKSKTEFDFNIDPKPSEGPGTKYLKSNSRSQQNRHSFMESSQSKAGTLQPNEKQSRHSYIDTIPQSSRSPSYRTKAKSHGALSDSKSVSQLSEARAQIAEPSTSRYFPSSCLDLNSPTSPTPTRHSDTRTLLSPSGRNNRNEGTLDSRRTTTRHSKTMEELKLPEHMDSSHSHSLSAPHESFSYGLGYTSPFSSQQRPHRHSMYVTRDKVRAKGLDGSLSIGQGMAARANSLQLLSPQPGEQLPPEMTVARSSVKETSREGTSSFHTRQKSEGGVYHDPHSDDGTAPKENRHLYNDPVPRRVGSFYRVPSPRPDNSFHENQVSTRVSSLPSESSSGTNHSKRQPAFDPWKSPEQISHSEQLKEKEKQGFFRSMKKKKKKSQTVPNSDSPDLLTLQKSIHSASTPSSRPKEWRPEKISDLQTQSQPLKSLRKLLHLSSASNHPASSDPRFQPLTAQQTKNSFSEIRIHPLSQASGGSSNIRQEPAPKGRPALQLPGQMDPGWHVSSVTRSATEGPSYSEQLGAKSGPNGHPYQRTQRSRMPNLNDLKETALGGGGSENLYFQGDYKDHDGDYKDHDIDYKDDDDKDGAPHHHHHH

SEQ ID NO: 106 - DNA, 6886 bp, Artificial Sequence
  AAVC-CBh-hCDKL5-107
cctgcaggcagctgcgcgctcgctcgctcactgaggccgcccgggcaaagcccgggcgtcgggcgacctttggtcgcccggcctcagtgagcgagcgagcgcgcagagagggagtggccaactccatcactaggggttcctgcggcctaaggcaattgttaatagtaatcaattacggggtcattagttcatagcccatatatggagttccgcgttacataacttacggtaaatggcccgcctggctgaccgcccaacgacccccgcccattgacgtcaataatgacgtatgttcccatagtaacgccaatagggactttccattgacgtcaatgggtggagtatttacggtaaactgcccacttggcagtacatcaagtgtatcatatgccaagtacgccccctattgacgtcaatgacggtaaatggcccgcctggcattatgcccagtacatgaccttacgggactttcctacttggcagtacatctccacgttctgcttcactctccccatctcccccccctccccacccccaattttgtatttatttattttttaattattttgtgcagcgatgggggcggggggggggggggcgcgcgccaggcggggcggggcggggcgaggggcggggcggggcgaggcggagaggtgcggcggcagccaatcagagcggcgcgctccgaaagtttccttttatggcgaggcggcggcggcggcggccctataaaaagcgaagcgcgcggcggggagtcgctgcgttgccttcgccccgtgccccgctccgcgccgcctcgcgccgcccgccccggctctgactgaccgcgttactcccacaggtgagcgggcgggacggcccttctcctccgggctgtaattagcaagaggtaagggtttaagggatggttggttggtggggtattaatgtttaattacctgttttacaggcctgaaatcacttggttttaggttgggctagccaaagcttgccgccaccatgaaaatccctaacattggtaacgtgatgaacaagtttgaaatcctcggggtcgtcggagaaggtgcctacggggtcgtgctgaagtgcagacacaaggagacacacgagatcgtggccatcaagaagttcaaggatagcgaggagaacgaggaggtgaaggagacaaccctgagagagctgaagatgctgcggacactgaagcaggagaacatcgtggagctgaaggaggctttcaggagacggggaaagctgtacctggtgtttgagtacgtggagaagaacatgctggagctgctggaggagatgcctaacggcgtgccccctgagaaggtgaagtcctacatctaccagctgatcaaggccatccactggtgccacaagaacgacatcgtgcacagagatatcaagccagagaacctgctgatctcccacaacgacgtgctgaagctgtgcgatttcggctttgcccggaacctgagcgagggaaacaacgccaactacacagagtacgtggctaccagatggtaccggagcccagagctgctgctgggagctccatacggaaagagcgtggacatgtggtccgtgggctgcatcctgggagagctgtctgacggccagcctctgttcccaggagagagcgagatcgatcagctgtttaccatccagaaggtgctgggccctctgccaagcgagcagatgaagctgttctactccaaccctagattccacggactgcggtttcccgccgtgaaccaccctcagagcctggagcgcaggtacctgggcatcctgaactccgtgctgctggatctgatgaagaacctgctgaagctggaccccgccgatagatacctgaccgagcagtgtctgaaccaccctacatttcagacccagcgcctgctggacaggagcccttccagatctgctaagcggaagccataccacgtggagagctccaccctgtccaacagaaaccaggccggcaagtctacagctctgcagagccaccaccggagcaactccaaggacatccagaacctgtctgtgggcctgcctagggctgatgagggactgccagctaacgagagcttcctgaacggcaacctggccggagcttctctgagcccactgcacacaaagacctaccaggcctctagccagcccggctccacatctaaggacctgaccaacaacaacatcccacacctgctgtctcccaaggaggctaagagcaagaccgagttcgactttaacatcgatcccaagcctagcgagggcccaggaacaaagtacctgaagagcaactcccgctctcagcagaacaggcactccttcatggagtcctctcagtctaaggccggcaccctgcagcccaacgagaagcagagcaggcactcctacatcgataccatcccccagagctccagaagcccttcctaccggacaaaggccaagagccacggcgctctgtctgacagcaagtccgtgtctaacctgtccgaggctagggctcagatcgctgagccaagcacctccaggtactttccttctagctgtctggacctgaactctcctacaagcccaacacccacccgccactccgatacaaggaccctgctgtctccaagcggcaggaacaacaggaacgagggaaccctggattctagacggaccacaacccgccacagcaagacaatggaggagctgaagctgccagagcacatggactcctctcactcccactctctgagcgccccccacgagtccttctcttacggcctgggatacacctcccccttcagctcccagcagaggccccacaggcactctatgtacgtgacacgcgacaaggtgagggccaagggcctggatggaagcctgtccatcggacagggaatggctgctagggctaactccctgcagctgctgtctcctcagccaggagagcagctgccaccagagatgaccgtggctcgctctagcgtgaaggagacaagcagggagggcacctcctctttccacacacgccagaagtccgagggcggagtgtaccacgacccccactctgacgatggaacagctcctaaggagaacaggcacctgtacaacgatcccgtgcctcgcagggtgggctccttctacagagtgccatctccccggcctgacaacagctttcacgagaacaacgtgtccacccgcgtgagctccctgccttctgagtctagctccggaacaaaccactctaagaggcagcccgcctttgacccttggaagagcccagagaacatctctcacagcgagcagctgaaggagaaggagaagcagggcttctttcgcagcatgaagaagaagaagaagaagagccagaccgtgcctaactccgactctccagatctgctgaccctgcagaagtccatccacagcgcctccacaccatctagccgccctaaggagtggaggcctgagaagatcagcgatctgcagacacagagccagccactgaagtccctgaggaagctgctgcacctgtcctctgccagcaaccaccccgctagctccgacccaagattccagcccctgacagcccagcagaccaagaactcttttagcgagatccggatccaccctctgtcccaggcttctggcggatctagcaacatcagacaggagccagctccaaagggccggcccgctctgcagctgcctggccagatggacccaggatggcacgtgtcctctgtgacaagatccgccaccgagggaccatcctactctgagcagctgggcgctaagtctggccctaacggacacccatacaataggactaatagaagcagaatgccaaacctcaatgacctcaaggaaacagcactctgataagcggccgcaactcgagactctagacgactgtgccttctagttgccagccatctgttgtttgcccctcccccgtgccttccttgaccctggaaggtgccactcccactgtcctttcctaataaaatgaggaaattgcatcgcattgtctgagtaggtgtcattctattctggggggtggggtggggcaggacagcaagggggaggattgggaagacaatagcaggcatgctggggatgcggtgggctctatggccgcgggccgcaggaacccctagtgatggagttggccactccctctctgcgcgctcgctcgctcactgaggccgggcgaccaaaggtcgcccgacgcccgggctttgcccgggcggcctcagtgagcgagcgagcgcgcagctgcctgcaggggcgcctgatgcggtattttctccttacgcatctgtgcggtatttcacaccgcatacgtcaaagcaaccatagtacgcgccctgtagcggcgcattaagcgcggcgggtgtggtggttacgcgcagcgtgaccgctacacttgccagcgccctagcgcccgctcctttcgctttcttcccttcctttctcgccacgttcgccggctttccccgtcaagctctaaatcgggggctccctttagggttccgatttagtgctttacggcacctcgaccccaaaaaacttgatttgggtgatggttcacgtagtgggccatcgccctgatagacggtttttcgccctttgacgttggagtccacgttctttaatagtggactcttgttccaaactggaacaacactcaaccctatctcgggctattcttttgatttataagggattttgccgatttcggcctattggttaaaaaatgagctgatttaacaaaaatttaacgcgaattttaacaaaatattaacgtttacaattttatggtgcactctcagtacaatctgctctgatgccgcatagttaagccagccccgacacccgccaacacccgctgacgcgccctgacgggcttgtctgctcccggcatccgcttacagacaagctgtgaccgtctccgggagctgcatgtgtcagaggttttcaccgtcatcaccgaaacgcgcgagacgaaagggcctcgtgatacgcctatttttataggttaatgtcatgataataatggtttcttagacgtcaggtggcacttttcggggaaatgtgcgcggaacccctatttgtttatttttctaaatacattcaaatatgtatccgctcatgagacaataaccctgataaatgcttcaataatattgaaaaaggaagagtatgagtattcaacatttccgtgtcgcccttattcccttttttgcggcattttgccttcctgtttttgctcacccagaaacgctggtgaaagtaaaagatgctgaagatcagttgggtgcacgagtgggttacatcgaactggatctcaacagcggtaagatccttgagagttttcgccccgaagaacgttttccaatgatgagcacttttaaagttctgctatgtggcgcggtattatcccgtattgacgccgggcaagagcaactcggtcgccgcatacactattctcagaatgacttggttgagtactcaccagtcacagaaaagcatcttacggatggcatgacagtaagagaattatgcagtgctgccataaccatgagtgataacactgcggccaacttacttctgacaacgatcggaggaccgaaggagctaaccgcttttttgcacaacatgggggatcatgtaactcgccttgatcgttgggaaccggagctgaatgaagccataccaaacgacgagcgtgacaccacgatgcctgtagcaatggcaacaacgttgcgcaaactattaactggcgaactacttactctagcttcccggcaacaattaatagactggatggaggcggataaagttgcaggaccacttctgcgctcggcccttccggctggctggtttattgctgataaatctggagccggtgagcgtgggtctcgcggtatcattgcagcactggggccagatggtaagccctcccgtatcgtagttatctacacgacggggagtcaggcaactatggatgaacgaaatagacagatcgctgagataggtgcctcactgattaagcattggtaactgtcagaccaagtttactcatatatactttagattgatttaaaacttcatttttaatttaaaaggatctaggtgaagatcctttttgataatctcatgaccaaaatcccttaacgtgagttttcgttccactgagcgtcagaccccgtagaaaagatcaaaggatcttcttgagatcctttttttctgcgcgtaatctgctgcttgcaaacaaaaaaaccaccgctaccagcggtggtttgtttgccggatcaagagctaccaactctttttccgaaggtaactggcttcagcagagcgcagataccaaatactgtccttctagtgtagccgtagttaggccaccacttcaagaactctgtagcaccgcctacatacctcgctctgctaatcctgttaccagtggctgctgccagtggcgataagtcgtgtcttaccgggttggactcaagacgatagttaccggataaggcgcagcggtcgggctgaacggggggttcgtgcacacagcccagcttggagcgaacgacctacaccgaactgagatacctacagcgtgagctatgagaaagcgccacgcttcccgaagggagaaaggcggacaggtatccggtaagcggcagggtcggaacaggagagcgcacgagggagcttccagggggaaacgcctggtatctttatagtcctgtcgggtttcgccacctctgacttgagcgtcgatttttgtgatgctcgtcaggggggcggagcctatggaaaaacgccagcaacgcggcctttttacggttcctggccttttgctggccttttgctcacatgt

SEQ ID NO: 107 - DNA, 6886 bp, Artificial Sequence
  AAVC-CBh-hCDKL5-107(dead kinase)
cctgcaggcagctgcgcgctcgctcgctcactgaggccgcccgggcaaagcccgggcgtcgggcgacctttggtcgcccggcctcagtgagcgagcgagcgcgcagagagggagtggccaactccatcactaggggttcctgcggcctaaggcaattgttaatagtaatcaattacggggtcattagttcatagcccatatatggagttccgcgttacataacttacggtaaatggcccgcctggctgaccgcccaacgacccccgcccattgacgtcaataatgacgtatgttcccatagtaacgccaatagggactttccattgacgtcaatgggtggagtatttacggtaaactgcccacttggcagtacatcaagtgtatcatatgccaagtacgccccctattgacgtcaatgacggtaaatggcccgcctggcattatgcccagtacatgaccttacgggactttcctacttggcagtacatctccacgttctgcttcactctccccatctcccccccctccccacccccaattttgtatttatttattttttaattattttgtgcagcgatgggggcggggggggggggggcgcgcgccaggcggggcggggcggggcgaggggcggggcggggcgaggcggagaggtgcggcggcagccaatcagagcggcgcgctccgaaagtttccttttatggcgaggcggcggcggcggcggccctataaaaagcgaagcgcgcggcggggagtcgctgcgttgccttcgccccgtgccccgctccgcgccgcctcgcgccgcccgccccggctctgactgaccgcgttactcccacaggtgagcgggcgggacggcccttctcctccgggctgtaattagcaagaggtaagggtttaagggatggttggttggtggggtattaatgtttaattacctgttttacaggcctgaaatcacttggttttaggttgggctagccaaagcttgccgccaccatgaaaatccctaatatcggaaatgtgatgaataagtttgaaatcctcggggtcgtcggagaaggtgcctacggggtcgtcctgaaatgcagacacaaggagacacacgagatcgtggccatcaggagattcaaggatagcgaggagaacgaggaggtgaaggagacaaccctgcgcgagctgaagatgctgaggacactgaagcaggagaacatcgtggagctgaaggaggctttccggcgcaggggaaagctgtacctggtgtttgagtacgtggagaagaacatgctggagctgctggaggagatgcctaacggcgtgccccctgagaaggtgaagtcctacatctaccagctgatcaaggccatccactggtgccacaagaacgacatcgtgcaccgcgatatcaagccagagaacctgctgatctcccacaacgacgtgctgaagctgtgcgatttcggctttgccaggaacctgagcgagggaaacaacgccaactacacagagtacgtggctacccgctggtacaggagcccagagctgctgctgggagctccatacggaaagagcgtggacatgtggtccgtgggctgcatcctgggagagctgtctgacggccagcctctgttcccaggagagagcgagatcgatcagctgtttaccatccagaaggtgctgggccctctgccaagcgagcagatgaagctgttctactccaaccctcgcttccacggactgaggtttcccgccgtgaaccaccctcagagcctggagagacggtacctgggcatcctgaactccgtgctgctggatctgatgaagaacctgctgaagctggaccccgccgatcgctacctgaccgagcagtgtctgaaccaccctacatttcagacccagagactgctggaccggagcccttcccgctctgctaagaggaagccataccacgtggagagctccaccctgtccaaccgcaaccaggccggcaagtctacagctctgcagagccaccacaggagcaactccaaggacatccagaacctgtctgtgggcctgcctagggctgatgagggactgccagctaacgagagcttcctgaacggcaacctggccggagcttctctgagcccactgcacacaaagacctaccaggcctctagccagcccggctccacatctaaggacctgaccaacaacaacatcccacacctgctgtctcccaaggaggctaagagcaagaccgagttcgactttaacatcgatcccaagcctagcgagggcccaggaacaaagtacctgaagagcaactccagatctcagcagaaccggcactccttcatggagtcctctcagtctaaggccggcaccctgcagcccaacgagaagcagagcaggcactcctacatcgataccatcccccagagctcccgcagcccttcctacaggacaaaggccaagagccacggcgctctgtctgacagcaagtccgtgtctaacctgtccgaggccagagctcagatcgctgagcccagcacctcccggtactttccttctagctgtctggacctgaactctcctacaagcccaacacccaccagacactccgatacacggaccctgctgtctccaagcggcagaaacaaccggaacgagggaaccctggattctcgcaggaccacaaccagacacagcaagacaatggaggagctgaagctgccagagcacatggactcctctcactcccactctctgagcgccccccacgagtccttctcttacggcctgggatacacctcccccttcagctcccagcagcgcccccacaggcactctatgtacgtgacaagagacaaggtgcgggccaagggcctggatggaagcctgtccatcggccagggaatggccgctagggctaactccctgcagctgctgtctcctcagccaggagagcagctgccacccgagatgaccgtggccagatctagcgtgaaggagacaagccgggagggcacctcctctttccacacaagacagaagtccgagggcggagtgtaccacgacccccactctgacgatggaacagctcctaaggagaaccggcacctgtacaacgatcccgtgcctagacgggtgggctccttctaccgcgtgccatctcccaggcctgacaacagctttcacgagaacaacgtgtccaccagagtgagctccctgccttctgagtctagctccggaacaaaccactctaagcggcagcccgcctttgacccttggaagagcccagagaacatctctcacagcgagcagctgaaggagaaggagaagcagggcttctttagaagcatgaagaagaagaagaagaagagccagaccgtgcctaactccgactctccagatctgctgaccctgcagaagtccatccacagcgcctccacaccctctagcagacctaaggagtggcggcctgagaagatcagcgatctgcagacacagagccagccactgaagtccctgcggaagctgctgcacctgtcctctgccagcaaccacccagctagctccgacccaaggttccagccactgacagctcagcagaccaagaactcttttagcgagatcaggatccaccctctgtcccaggcttctggcggatctagcaacatcaggcaggagccagctccaaagggcaggcccgctctgcagctgcctggacagatggacccaggatggcacgtgtcctctgtgacaagatccgccaccgagggaccatcctactctgagcagctgggcgctaagtctggccctaacggacacccatacaacagaacaaacagaagcagaatgcccaacctcaatgacctcaaagaaacagcactctgataagcggccgcaactcgagactctagacgactgtgccttctagttgccagccatctgttgtttgcccctcccccgtgccttccttgaccctggaaggtgccactcccactgtcctttcctaataaaatgaggaaattgcatcgcattgtctgagtaggtgtcattctattctggggggtggggtggggcaggacagcaagggggaggattgggaagacaatagcaggcatgctggggatgcggtgggctctatggccgcgggccgcaggaacccctagtgatggagttggccactccctctctgcgcgctcgctcgctcactgaggccgggcgaccaaaggtcgcccgacgcccgggctttgcccgggcggcctcagtgagcgagcgagcgcgcagctgcctgcaggggcgcctgatgcggtattttctccttacgcatctgtgcggtatttcacaccgcatacgtcaaagcaaccatagtacgcgccctgtagcggcgcattaagcgcggcgggtgtggtggttacgcgcagcgtgaccgctacacttgccagcgccctagcgcccgctcctttcgctttcttcccttcctttctcgccacgttcgccggctttccccgtcaagctctaaatcgggggctccctttagggttccgatttagtgctttacggcacctcgaccccaaaaaacttgatttgggtgatggttcacgtagtgggccatcgccctgatagacggtttttcgccctttgacgttggagtccacgttctttaatagtggactcttgttccaaactggaacaacactcaaccctatctcgggctattcttttgatttataagggattttgccgatttcggcctattggttaaaaaatgagctgatttaacaaaaatttaacgcgaattttaacaaaatattaacgtttacaattttatggtgcactctcagtacaatctgctctgatgccgcatagttaagccagccccgacacccgccaacacccgctgacgcgccctgacgggcttgtctgctcccggcatccgcttacagacaagctgtgaccgtctccgggagctgcatgtgtcagaggttttcaccgtcatcaccgaaacgcgcgagacgaaagggcctcgtgatacgcctatttttataggttaatgtcatgataataatggtttcttagacgtcaggtggcacttttcggggaaatgtgcgcggaacccctatttgtttatttttctaaatacattcaaatatgtatccgctcatgagacaataaccctgataaatgcttcaataatattgaaaaaggaagagtatgagtattcaacatttccgtgtcgcccttattcccttttttgcggcattttgccttcctgtttttgctcacccagaaacgctggtgaaagtaaaagatgctgaagatcagttgggtgcacgagtgggttacatcgaactggatctcaacagcggtaagatccttgagagttttcgccccgaagaacgttttccaatgatgagcacttttaaagttctgctatgtggcgcggtattatcccgtattgacgccgggcaagagcaactcggtcgccgcatacactattctcagaatgacttggttgagtactcaccagtcacagaaaagcatcttacggatggcatgacagtaagagaattatgcagtgctgccataaccatgagtgataacactgcggccaacttacttctgacaacgatcggaggaccgaaggagctaaccgcttttttgcacaacatgggggatcatgtaactcgccttgatcgttgggaaccggagctgaatgaagccataccaaacgacgagcgtgacaccacgatgcctgtagcaatggcaacaacgttgcgcaaactattaactggcgaactacttactctagcttcccggcaacaattaatagactggatggaggcggataaagttgcaggaccacttctgcgctcggcccttccggctggctggtttattgctgataaatctggagccggtgagcgtgggtctcgcggtatcattgcagcactggggccagatggtaagccctcccgtatcgtagttatctacacgacggggagtcaggcaactatggatgaacgaaatagacagatcgctgagataggtgcctcactgattaagcattggtaactgtcagaccaagtttactcatatatactttagattgatttaaaacttcatttttaatttaaaaggatctaggtgaagatcctttttgataatctcatgaccaaaatcccttaacgtgagttttcgttccactgagcgtcagaccccgtagaaaagatcaaaggatcttcttgagatcctttttttctgcgcgtaatctgctgcttgcaaacaaaaaaaccaccgctaccagcggtggtttgtttgccggatcaagagctaccaactctttttccgaaggtaactggcttcagcagagcgcagataccaaatactgtccttctagtgtagccgtagttaggccaccacttcaagaactctgtagcaccgcctacatacctcgctctgctaatcctgttaccagtggctgctgccagtggcgataagtcgtgtcttaccgggttggactcaagacgatagttaccggataaggcgcagcggtcgggctgaacggggggttcgtgcacacagcccagcttggagcgaacgacctacaccgaactgagatacctacagcgtgagctatgagaaagcgccacgcttcccgaagggagaaaggcggacaggtatccggtaagcggcagggtcggaacaggagagcgcacgagggagcttccagggggaaacgcctggtatctttatagtcctgtcgggtttcgccacctctgacttgagcgtcgatttttgtgatgctcgtcaggggggcggagcctatggaaaaacgccagcaacgcggcctttttacggttcctggccttttgctggccttttgctcacatgt

SEQ ID NO: 108 - DNA, 4723 bp, Artificial Sequence
  AAVC-CBh-eGFP
cctgcaggcagctgcgcgctcgctcgctcactgaggccgcccgggcaaagcccgggcgtcgggcgacctttggtcgcccggcctcagtgagcgagcgagcgcgcagagagggagtggccaactccatcactaggggttcctgcggcctaaggcaattgttaatagtaatcaattacggggtcattagttcatagcccatatatggagttccgcgttacataacttacggtaaatggcccgcctggctgaccgcccaacgacccccgcccattgacgtcaataatgacgtatgttcccatagtaacgccaatagggactttccattgacgtcaatgggtggagtatttacggtaaactgcccacttggcagtacatcaagtgtatcatatgccaagtacgccccctattgacgtcaatgacggtaaatggcccgcctggcattatgcccagtacatgaccttacgggactttcctacttggcagtacatctccacgttctgcttcactctccccatctcccccccctccccacccccaattttgtatttatttattttttaattattttgtgcagcgatgggggcggggggggggggggcgcgcgccaggcggggcggggcggggcgaggggcggggcggggcgaggcggagaggtgcggcggcagccaatcagagcggcgcgctccgaaagtttccttttatggcgaggcggcggcggcggcggccctataaaaagcgaagcgcgcggcggggagtcgctgcgttgccttcgccccgtgccccgctccgcgccgcctcgcgccgcccgccccggctctgactgaccgcgttactcccacaggtgagcgggcgggacggcccttctcctccgggctgtaattagcaagaggtaagggtttaagggatggttggttggtggggtattaatgtttaattacctgttttacaggcctgaaatcacttggttttaggttgggctagccaaagcttgccgccaccatggtgtcaaagggggaggaactgtttactggagtcgtgcctattctggtcgaactggatggggatgtcaacggtcataagtttagcgtgtccggagagggagagggcgacgctacctacggaaagctgacactgaagttcatctgcaccacaggcaagctgcccgtgccttggccaaccctggtgaccacactgacatacggcgtgcagtgttttagccggtacccagaccacatgaagcagcacgatttctttaagtccgccatgcccgagggatacgtgcaggagaggaccatcttctttaaggacgatggcaactacaagaccagagctgaggtgaagttcgagggagacacactggtgaaccggatcgagctgaagggcatcgactttaaggaggatggaaacatcctgggccacaagctggagtacaactacaactctcacaacgtgtacatcatggccgataagcagaagaacggaatcaaggtgaacttcaagatccgccacaacatcgaggacggcagcgtgcagctggctgatcactaccagcagaacacccctatcggagacggacccgtgctgctgcctgataaccactacctgagcacacagtccgctctgtctaaggacccaaacgagaagagggatcacatggtcctcctggaatttgtcactgctgctgggattactctggggatggatgaactctataagtgataagcggccgcaactcgagactctagacgactgtgccttctagttgccagccatctgttgtttgcccctcccccgtgccttccttgaccctggaaggtgccactcccactgtcctttcctaataaaatgaggaaattgcatcgcattgtctgagtaggtgtcattctattctggggggtggggtggggcaggacagcaagggggaggattgggaagacaatagcaggcatgctggggatgcggtgggctctatggccgcgggccgcaggaacccctagtgatggagttggccactccctctctgcgcgctcgctcgctcactgaggccgggcgaccaaaggtcgcccgacgcccgggctttgcccgggcggcctcagtgagcgagcgagcgcgcagctgcctgcaggggcgcctgatgcggtattttctccttacgcatctgtgcggtatttcacaccgcatacgtcaaagcaaccatagtacgcgccctgtagcggcgcattaagcgcggcgggtgtggtggttacgcgcagcgtgaccgctacacttgccagcgccctagcgcccgctcctttcgctttcttcccttcctttctcgccacgttcgccggctttccccgtcaagctctaaatcgggggctccctttagggttccgatttagtgctttacggcacctcgaccccaaaaaacttgatttgggtgatggttcacgtagtgggccatcgccctgatagacggtttttcgccctttgacgttggagtccacgttctttaatagtggactcttgttccaaactggaacaacactcaaccctatctcgggctattcttttgatttataagggattttgccgatttcggcctattggttaaaaaatgagctgatttaacaaaaatttaacgcgaattttaacaaaatattaacgtttacaattttatggtgcactctcagtacaatctgctctgatgccgcatagttaagccagccccgacacccgccaacacccgctgacgcgccctgacgggcttgtctgctcccggcatccgcttacagacaagctgtgaccgtctccgggagctgcatgtgtcagaggttttcaccgtcatcaccgaaacgcgcgagacgaaagggcctcgtgatacgcctatttttataggttaatgtcatgataataatggtttcttagacgtcaggtggcacttttcggggaaatgtgcgcggaacccctatttgtttatttttctaaatacattcaaatatgtatccgctcatgagacaataaccctgataaatgcttcaataatattgaaaaaggaagagtatgagtattcaacatttccgtgtcgcccttattcccttttttgcggcattttgccttcctgtttttgctcacccagaaacgctggtgaaagtaaaagatgctgaagatcagttgggtgcacgagtgggttacatcgaactggatctcaacagcggtaagatccttgagagttttcgccccgaagaacgttttccaatgatgagcacttttaaagttctgctatgtggcgcggtattatcccgtattgacgccgggcaagagcaactcggtcgccgcatacactattctcagaatgacttggttgagtactcaccagtcacagaaaagcatcttacggatggcatgacagtaagagaattatgcagtgctgccataaccatgagtgataacactgcggccaacttacttctgacaacgatcggaggaccgaaggagctaaccgcttttttgcacaacatgggggatcatgtaactcgccttgatcgttgggaaccggagctgaatgaagccataccaaacgacgagcgtgacaccacgatgcctgtagcaatggcaacaacgttgcgcaaactattaactggcgaactacttactctagcttcccggcaacaattaatagactggatggaggcggataaagttgcaggaccacttctgcgctcggcccttccggctggctggtttattgctgataaatctggagccggtgagcgtgggtctcgcggtatcattgcagcactggggccagatggtaagccctcccgtatcgtagttatctacacgacggggagtcaggcaactatggatgaacgaaatagacagatcgctgagataggtgcctcactgattaagcattggtaactgtcagaccaagtttactcatatatactttagattgatttaaaacttcatttttaatttaaaaggatctaggtgaagatcctttttgataatctcatgaccaaaatcccttaacgtgagttttcgttccactgagcgtcagaccccgtagaaaagatcaaaggatcttcttgagatcctttttttctgcgcgtaatctgctgcttgcaaacaaaaaaaccaccgctaccagcggtggtttgtttgccggatcaagagctaccaactctttttccgaaggtaactggcttcagcagagcgcagataccaaatactgtccttctagtgtagccgtagttaggccaccacttcaagaactctgtagcaccgcctacatacctcgctctgctaatcctgttaccagtggctgctgccagtggcgataagtcgtgtcttaccgggttggactcaagacgatagttaccggataaggcgcagcggtcgggctgaacggggggttcgtgcacacagcccagcttggagcgaacgacctacaccgaactgagatacctacagcgtgagctatgagaaagcgccacgcttcccgaagggagaaaggcggacaggtatccggtaagcggcagggtcggaacaggagagcgcacgagggagcttccagggggaaacgcctggtatctttatagtcctgtcgggtttcgccacctctgacttgagcgtcgatttttgtgatgctcgtcaggggggcggagcctatggaaaaacgccagcaacgcggcctttttacggttcctggccttttgctggccttttgctcacatgt

SEQ ID NO: 109 - DNA, 4783 bp, Artificial Sequence
  AAVC-CBh-NLS-eGFP
cctgcaggcagctgcgcgctcgctcgctcactgaggccgcccgggcaaagcccgggcgtcgggcgacctttggtcgcccggcctcagtgagcgagcgagcgcgcagagagggagtggccaactccatcactaggggttcctgcggcctaaggcaattgttaatagtaatcaattacggggtcattagttcatagcccatatatggagttccgcgttacataacttacggtaaatggcccgcctggctgaccgcccaacgacccccgcccattgacgtcaataatgacgtatgttcccatagtaacgccaatagggactttccattgacgtcaatgggtggagtatttacggtaaactgcccacttggcagtacatcaagtgtatcatatgccaagtacgccccctattgacgtcaatgacggtaaatggcccgcctggcattatgcccagtacatgaccttacgggactttcctacttggcagtacatctccacgttctgcttcactctccccatctcccccccctccccacccccaattttgtatttatttattttttaattattttgtgcagcgatgggggcggggggggggggggcgcgcgccaggcggggcggggcggggcgaggggcggggcggggcgaggcggagaggtgcggcggcagccaatcagagcggcgcgctccgaaagtttccttttatggcgaggcggcggcggcggcggccctataaaaagcgaagcgcgcggcggggagtcgctgcgttgccttcgccccgtgccccgctccgcgccgcctcgcgccgcccgccccggctctgactgaccgcgttactcccacaggtgagcgggcgggacggcccttctcctccgggctgtaattagcaagaggtaagggtttaagggatggttggttggtggggtattaatgtttaattacctgttttacaggcctgaaatcacttggttttaggttgggctagccaaagcttgccgccaccatggccccaaaaaagaaaagaaaagtgaggtatcctgcattcctgtacaaagtcgctactatggtgtcaaaaggtgaagagctgttcaccggagtggtgcccatcctggtggagctggacggagatgtgaacggccacaagttcagcgtgtccggagagggagagggcgacgccacctacggaaagctgacactgaagtttatctgcaccacaggcaagctgcccgtgccttggccaaccctggtgaccacactgacatacggcgtgcagtgtttctctcggtacccagaccacatgaagcagcacgatttctttaagagcgccatgcccgagggatacgtgcaggagaggacaatcttctttaaggacgatggcaactacaagaccagagctgaggtgaagttcgagggagacacactggtgaaccggatcgagctgaagggcatcgactttaaggaggatggaaacatcctgggccacaagctggagtacaactacaactcccacaacgtgtacatcatggccgataagcagaagaacggaatcaaggtgaactttaagatccgccacaacatcgaggacggctctgtgcagctggctgatcactaccagcagaacacccctatcggagacggacccgtgctgctgcctgataaccactacctgtctacacagagcgccctgtccaaggacccaaacgagaagagggatcacatggtgctcctggaatttgtcactgctgccggtattactctcgggatggatgaactgtataaatgataagcggccgcaactcgagactctagacgactgtgccttctagttgccagccatctgttgtttgcccctcccccgtgccttccttgaccctggaaggtgccactcccactgtcctttcctaataaaatgaggaaattgcatcgcattgtctgagtaggtgtcattctattctggggggtggggtggggcaggacagcaagggggaggattgggaagacaatagcaggcatgctggggatgcggtgggctctatggccgcgggccgcaggaacccctagtgatggagttggccactccctctctgcgcgctcgctcgctcactgaggccgggcgaccaaaggtcgcccgacgcccgggctttgcccgggcggcctcagtgagcgagcgagcgcgcagctgcctgcaggggcgcctgatgcggtattttctccttacgcatctgtgcggtatttcacaccgcatacgtcaaagcaaccatagtacgcgccctgtagcggcgcattaagcgcggcgggtgtggtggttacgcgcagcgtgaccgctacacttgccagcgccctagcgcccgctcctttcgctttcttcccttcctttctcgccacgttcgccggctttccccgtcaagctctaaatcgggggctccctttagggttccgatttagtgctttacggcacctcgaccccaaaaaacttgatttgggtgatggttcacgtagtgggccatcgccctgatagacggtttttcgccctttgacgttggagtccacgttctttaatagtggactcttgttccaaactggaacaacactcaaccctatctcgggctattcttttgatttataagggattttgccgatttcggcctattggttaaaaaatgagctgatttaacaaaaatttaacgcgaattttaacaaaatattaacgtttacaattttatggtgcactctcagtacaatctgctctgatgccgcatagttaagccagccccgacacccgccaacacccgctgacgcgccctgacgggcttgtctgctcccggcatccgcttacagacaagctgtgaccgtctccgggagctgcatgtgtcagaggttttcaccgtcatcaccgaaacgcgcgagacgaaagggcctcgtgatacgcctatttttataggttaatgtcatgataataatggtttcttagacgtcaggtggcacttttcggggaaatgtgcgcggaacccctatttgtttatttttctaaatacattcaaatatgtatccgctcatgagacaataaccctgataaatgcttcaataatattgaaaaaggaagagtatgagtattcaacatttccgtgtcgcccttattcccttttttgcggcattttgccttcctgtttttgctcacccagaaacgctggtgaaagtaaaagatgctgaagatcagttgggtgcacgagtgggttacatcgaactggatctcaacagcggtaagatccttgagagttttcgccccgaagaacgttttccaatgatgagcacttttaaagttctgctatgtggcgcggtattatcccgtattgacgccgggcaagagcaactcggtcgccgcatacactattctcagaatgacttggttgagtactcaccagtcacagaaaagcatcttacggatggcatgacagtaagagaattatgcagtgctgccataaccatgagtgataacactgcggccaacttacttctgacaacgatcggaggaccgaaggagctaaccgcttttttgcacaacatgggggatcatgtaactcgccttgatcgttgggaaccggagctgaatgaagccataccaaacgacgagcgtgacaccacgatgcctgtagcaatggcaacaacgttgcgcaaactattaactggcgaactacttactctagcttcccggcaacaattaatagactggatggaggcggataaagttgcaggaccacttctgcgctcggcccttccggctggctggtttattgctgataaatctggagccggtgagcgtgggtctcgcggtatcattgcagcactggggccagatggtaagccctcccgtatcgtagttatctacacgacggggagtcaggcaactatggatgaacgaaatagacagatcgctgagataggtgcctcactgattaagcattggtaactgtcagaccaagtttactcatatatactttagattgatttaaaacttcatttttaatttaaaaggatctaggtgaagatcctttttgataatctcatgaccaaaatcccttaacgtgagttttcgttccactgagcgtcagaccccgtagaaaagatcaaaggatcttcttgagatcctttttttctgcgcgtaatctgctgcttgcaaacaaaaaaaccaccgctaccagcggtggtttgtttgccggatcaagagctaccaactctttttccgaaggtaactggcttcagcagagcgcagataccaaatactgtccttctagtgtagccgtagttaggccaccacttcaagaactctgtagcaccgcctacatacctcgctctgctaatcctgttaccagtggctgctgccagtggcgataagtcgtgtcttaccgggttggactcaagacgatagttaccggataaggcgcagcggtcgggctgaacggggggttcgtgcacacagcccagcttggagcgaacgacctacaccgaactgagatacctacagcgtgagctatgagaaagcgccacgcttcccgaagggagaaaggcggacaggtatccggtaagcggcagggtcggaacaggagagcgcacgagggagcttccagggggaaacgcctggtatctttatagtcctgtcgggtttcgccacctctgacttgagcgtcgatttttgtgatgctcgtcaggggggcggagcctatggaaaaacgccagcaacgcggcctttttacggttcctggccttttgctggccttttgctcacatgt

SEQ ID NO: 110 - DNA, 7066 bp, Artificial Sequence
  AAVC-CBh-mBPIP-TATkappa28-hCDKL5-107
cctgcaggcagctgcgcgctcgctcgctcactgaggccgcccgggcaaagcccgggcgtcgggcgacctttggtcgcccggcctcagtgagcgagcgagcgcgcagagagggagtggccaactccatcactaggggttcctgcggcctaaggcaattgttaatagtaatcaattacggggtcattagttcatagcccatatatggagttccgcgttacataacttacggtaaatggcccgcctggctgaccgcccaacgacccccgcccattgacgtcaataatgacgtatgttcccatagtaacgccaatagggactttccattgacgtcaatgggtggagtatttacggtaaactgcccacttggcagtacatcaagtgtatcatatgccaagtacgccccctattgacgtcaatgacggtaaatggcccgcctggcattatgcccagtacatgaccttacgggactttcctacttggcagtacatctccacgttctgcttcactctccccatctcccccccctccccacccccaattttgtatttatttattttttaattattttgtgcagcgatgggggcggggggggggggggcgcgcgccaggcggggcggggcggggcgaggggcggggcggggcgaggcggagaggtgcggcggcagccaatcagagcggcgcgctccgaaagtttccttttatggcgaggcggcggcggcggcggccctataaaaagcgaagcgcgcggcggggagtcgctgcgttgccttcgccccgtgccccgctccgcgccgcctcgcgccgcccgccccggctctgactgaccgcgttactcccacaggtgagcgggcgggacggcccttctcctccgggctgtaattagcaagaggtaagggtttaagggatggttggttggtggggtattaatgtttaattacctgttttacaggcctgaaatcacttggttttaggttgggctagccaaagcttgccgccaccatgaaactctccctggtcgctgctatgctgctcctcctgtccctcgtcgctgctatgctcctgctgctgtctgccgctcgggctggtgatgctgctcagccagctaggagagctaggaggaccaagctggctgcttacgctagaaaggctgctagacaggctagggctggaggaggcggatccaagatccccaacatcggcaacgtgatgaacaagttcgagatcctgggagtggtgggagagggagcttacggagtggtgctgaagtgccggcacaaggagacacacgagatcgtggctatcaagaagtttaaggacagcgaggagaacgaggaggtgaaggagacaaccctgcgcgagctgaagatgctgaggacactgaagcaggagaacatcgtggagctgaaggaggccttcaggagacggggaaagctgtacctggtgtttgagtacgtggagaagaacatgctggagctgctggaggagatgccaaacggagtgccacctgagaaggtgaagtcctacatctaccagctgatcaaggctatccactggtgccacaagaacgacatcgtgcaccgcgatatcaagcctgagaacctgctgatctcccacaacgacgtgctgaagctgtgcgatttcggctttgccaggaacctgagcgagggaaacaacgccaactacacagagtacgtggctacccgctggtacaggagcccagagctgctgctgggagctccatacggaaagagcgtggacatgtggtccgtgggctgcatcctgggagagctgtctgacggccagcctctgttcccaggagagagcgagatcgatcagctgtttaccatccagaaggtgctgggccctctgccaagcgagcagatgaagctgttctactccaaccctcgcttccacggactgaggtttcccgccgtgaaccaccctcagagcctggagcgcaggtacctgggcatcctgaactccgtgctgctggatctgatgaagaacctgctgaagctggaccccgccgatagatacctgaccgagcagtgtctgaaccaccctacatttcagacccagagactgctggaccggagcccttcccgctctgctaagaggaagccataccacgtggagagctccaccctgtccaaccgcaaccaggccggcaagtctacagctctgcagagccaccacaggagcaactccaaggacatccagaacctgtctgtgggcctgcctagggctgatgagggactgccagctaacgagagcttcctgaacggcaacctggccggagcttctctgagcccactgcacacaaagacctaccaggcctctagccagcccggctccacatctaaggacctgaccaacaacaacatcccacacctgctgtctcccaaggaggctaagagcaagaccgagttcgactttaacatcgatcccaagcctagcgagggccctggaacaaagtacctgaagagcaactccagatctcagcagaaccggcactccttcatggagtcctctcagtctaaggccggcaccctgcagccaaacgagaagcagagccggcactcctacatcgataccatcccccagagctcccgcagcccttcctacaggacaaaggccaagagccacggcgctctgtctgacagcaagtccgtgtctaacctgtccgaggccagagctcagatcgctgagccaagcacctccaggtactttccttctagctgtctggacctgaactctcctacaagcccaacacccaccagacacagcgatacacggaccctgctgtctccaagcggcagaaacaaccggaacgagggaaccctggattctagacggaccacaaccaggcacagcaagacaatggaggagctgaagctgccagagcacatggactcctctcactcccactctctgagcgccccccacgagtccttctcttacggcctgggatacacctcccccttcagctcccagcagcgcccccacaggcactctatgtacgtgacaagagacaaggtgcgggccaagggcctggatggaagcctgtccatcggccagggaatggccgctagagctaactccctgcagctgctgtctcctcagccaggagagcagctgccacccgagatgaccgtggccagatctagcgtgaaggagacaagccgggagggcacctcctctttccacacaagacagaagtccgagggcggagtgtaccacgacccccactctgacgatggaacagctcctaaggagaaccggcacctgtacaacgatcccgtgcctcgcagggtgggctccttctaccgcgtgccatctcccaggcctgacaacagctttcacgagaacaacgtgtccaccagagtgagctccctgccatctgagtctagctccggaacaaaccactctaagcggcagcccgccttcgatccttggaagagcccagagaacatctctcacagcgagcagctgaaggagaaggagaagcagggcttctttcgcagcatgaagaagaagaagaagaagagccagaccgtgcctaactccgactctccagatctgctgaccctgcagaagtccatccacagcgcctccacaccctctagcagacctaaggagtggcggcctgagaagatcagcgatctgcagacacagagccagccactgaagtccctgaggaagctgctgcacctgtcctctgccagcaaccacccagctagctccgacccaaggttccagccactgacagctcagcagaccaagaactcttttagcgagatcaggatccaccctctgtcccaggcttctggcggatctagcaacatcaggcaggagccagctccaaagggcaggcccgctctgcagctgcctggacagatggacccaggatggcacgtgtcctctgtgacaaggtccgccaccgagggaccatcctactctgagcagctgggcgctaagtctggccctaacggacacccatacaaccgaacaaatagaagtaggatgccaaacctcaatgacctcaaggaaactgccctgtgataagcggccgcaactcgagactctagacgactgtgccttctagttgccagccatctgttgtttgcccctcccccgtgccttccttgaccctggaaggtgccactcccactgtcctttcctaataaaatgaggaaattgcatcgcattgtctgagtaggtgtcattctattctggggggtggggtggggcaggacagcaagggggaggattgggaagacaatagcaggcatgctggggatgcggtgggctctatggccgcgggccgcaggaacccctagtgatggagttggccactccctctctgcgcgctcgctcgctcactgaggccgggcgaccaaaggtcgcccgacgcccgggctttgcccgggcggcctcagtgagcgagcgagcgcgcagctgcctgcaggggcgcctgatgcggtattttctccttacgcatctgtgcggtatttcacaccgcatacgtcaaagcaaccatagtacgcgccctgtagcggcgcattaagcgcggcgggtgtggtggttacgcgcagcgtgaccgctacacttgccagcgccctagcgcccgctcctttcgctttcttcccttcctttctcgccacgttcgccggctttccccgtcaagctctaaatcgggggctccctttagggttccgatttagtgctttacggcacctcgaccccaaaaaacttgatttgggtgatggttcacgtagtgggccatcgccctgatagacggtttttcgccctttgacgttggagtccacgttctttaatagtggactcttgttccaaactggaacaacactcaaccctatctcgggctattcttttgatttataagggattttgccgatttcggcctattggttaaaaaatgagctgatttaacaaaaatttaacgcgaattttaacaaaatattaacgtttacaattttatggtgcactctcagtacaatctgctctgatgccgcatagttaagccagccccgacacccgccaacacccgctgacgcgccctgacgggcttgtctgctcccggcatccgcttacagacaagctgtgaccgtctccgggagctgcatgtgtcagaggttttcaccgtcatcaccgaaacgcgcgagacgaaagggcctcgtgatacgcctatttttataggttaatgtcatgataataatggtttcttagacgtcaggtggcacttttcggggaaatgtgcgcggaacccctatttgtttatttttctaaatacattcaaatatgtatccgctcatgagacaataaccctgataaatgcttcaataatattgaaaaaggaagagtatgagtattcaacatttccgtgtcgcccttattcccttttttgcggcattttgccttcctgtttttgctcacccagaaacgctggtgaaagtaaaagatgctgaagatcagttgggtgcacgagtgggttacatcgaactggatctcaacagcggtaagatccttgagagttttcgccccgaagaacgttttccaatgatgagcacttttaaagttctgctatgtggcgcggtattatcccgtattgacgccgggcaagagcaactcggtcgccgcatacactattctcagaatgacttggttgagtactcaccagtcacagaaaagcatcttacggatggcatgacagtaagagaattatgcagtgctgccataaccatgagtgataacactgcggccaacttacttctgacaacgatcggaggaccgaaggagctaaccgcttttttgcacaacatgggggatcatgtaactcgccttgatcgttgggaaccggagctgaatgaagccataccaaacgacgagcgtgacaccacgatgcctgtagcaatggcaacaacgttgcgcaaactattaactggcgaactacttactctagcttcccggcaacaattaatagactggatggaggcggataaagttgcaggaccacttctgcgctcggcccttccggctggctggtttattgctgataaatctggagccggtgagcgtgggtctcgcggtatcattgcagcactggggccagatggtaagccctcccgtatcgtagttatctacacgacggggagtcaggcaactatggatgaacgaaatagacagatcgctgagataggtgcctcactgattaagcattggtaactgtcagaccaagtttactcatatatactttagattgatttaaaacttcatttttaatttaaaaggatctaggtgaagatcctttttgataatctcatgaccaaaatcccttaacgtgagttttcgttccactgagcgtcagaccccgtagaaaagatcaaaggatcttcttgagatcctttttttctgcgcgtaatctgctgcttgcaaacaaaaaaaccaccgctaccagcggtggtttgtttgccggatcaagagctaccaactctttttccgaaggtaactggcttcagcagagcgcagataccaaatactgtccttctagtgtagccgtagttaggccaccacttcaagaactctgtagcaccgcctacatacctcgctctgctaatcctgttaccagtggctgctgccagtggcgataagtcgtgtcttaccgggttggactcaagacgatagttaccggataaggcgcagcggtcgggctgaacggggggttcgtgcacacagcccagcttggagcgaacgacctacaccgaactgagatacctacagcgtgagctatgagaaagcgccacgcttcccgaagggagaaaggcggacaggtatccggtaagcggcagggtcggaacaggagagcgcacgagggagcttccagggggaaacgcctggtatctttatagtcctgtcgggtttcgccacctctgacttgagcgtcgatttttgtgatgctcgtcaggggggcggagcctatggaaaaacgccagcaacgcggcctttttacggttcctggccttttgctggccttttgctcacatgt

SEQ ID NO: 111 - DNA, 7066 bp, Artificial Sequence
  AAVC-CBh-mBPIP-TATkappa28-hCDKL5-107 (dead kinase)
cctgcaggcagctgcgcgctcgctcgctcactgaggccgcccgggcaaagcccgggcgtcgggcgacctttggtcgcccggcctcagtgagcgagcgagcgcgcagagagggagtggccaactccatcactaggggttcctgcggcctaaggcaattgttaatagtaatcaattacggggtcattagttcatagcccatatatggagttccgcgttacataacttacggtaaatggcccgcctggctgaccgcccaacgacccccgcccattgacgtcaataatgacgtatgttcccatagtaacgccaatagggactttccattgacgtcaatgggtggagtatttacggtaaactgcccacttggcagtacatcaagtgtatcatatgccaagtacgccccctattgacgtcaatgacggtaaatggcccgcctggcattatgcccagtacatgaccttacgggactttcctacttggcagtacatctccacgttctgcttcactctccccatctcccccccctccccacccccaattttgtatttatttattttttaattattttgtgcagcgatgggggcggggggggggggggcgcgcgccaggcggggcggggcggggcgaggggcggggcggggcgaggcggagaggtgcggcggcagccaatcagagcggcgcgctccgaaagtttccttttatggcgaggcggcggcggcggcggccctataaaaagcgaagcgcgcggcggggagtcgctgcgttgccttcgccccgtgccccgctccgcgccgcctcgcgccgcccgccccggctctgactgaccgcgttactcccacaggtgagcgggcgggacggcccttctcctccgggctgtaattagcaagaggtaagggtttaagggatggttggttggtggggtattaatgtttaattacctgttttacaggcctgaaatcacttggttttaggttgggctagccaaagcttgccgccaccatgaaactctccctcgtcgccgctatgctcctgctcctctccctcgtcgctgccatgctcctgctgctcagtgccgctcgggccggagatgctgctcagccagctaggagagctaggaggaccaagctggctgcttacgctaggaaggctgctaggcaggctagggctggcggaggcggatccaagatccccaacatcggcaacgtgatgaacaagttcgagatcctgggagtggtgggagagggagcttacggagtggtgctgaagtgcaggcacaaggagacacacgagatcgtggctatcaggaggttcaaggacagcgaggagaacgaggaggtgaaggagacaaccctgagagagctgaagatgctgcggacactgaagcaggagaacatcgtggagctgaaggaggccttccggcgcaggggaaagctgtacctggtgtttgagtacgtggagaagaacatgctggagctgctggaggagatgccaaacggagtgccacctgagaaggtgaagtcctacatctaccagctgatcaaggctatccactggtgccacaagaacgacatcgtgcacagagatatcaagcctgagaacctgctgatctcccacaacgacgtgctgaagctgtgcgatttcggctttgcccggaacctgagcgagggaaacaacgccaactacacagagtacgtggctaccagatggtaccggagcccagagctgctgctgggagctccatacggaaagagcgtggacatgtggtccgtgggctgcatcctgggagagctgtctgacggccagcctctgttcccaggagagagcgagatcgatcagctgtttaccatccagaaggtgctgggccctctgccaagcgagcagatgaagctgttctactccaaccctagattccacggactgcggtttcccgccgtgaaccaccctcagagcctggagagacggtacctgggcatcctgaactccgtgctgctggatctgatgaagaacctgctgaagctggaccccgccgatcgctacctgaccgagcagtgtctgaaccaccctacatttcagacccagcgcctgctggacaggagcccttccagatctgctaagcggaagccataccacgtggagagctccaccctgtccaacagaaaccaggccggcaagtctacagctctgcagagccaccaccggagcaactccaaggacatccagaacctgtctgtgggcctgcctagagccgatgagggactgccagctaacgagagcttcctgaacggcaacctggccggagcttctctgagcccactgcacacaaagacctaccaggcctctagccagcccggctccacatctaaggacctgaccaacaacaacatcccacacctgctgtctcccaaggaggctaagagcaagaccgagttcgactttaacatcgatcccaagcctagcgagggccctggaacaaagtacctgaagagcaactcccgctctcagcagaacaggcactccttcatggagtcctctcagtctaaggccggcaccctgcagccaaacgagaagcagagcagacactcctacatcgataccatcccccagagctccagaagcccttcctaccggacaaaggccaagagccacggcgctctgtctgacagcaagtccgtgtctaacctgtccgaggctagggctcagatcgctgagcccagcacctccaggtactttccttctagctgtctggacctgaactctcctacaagcccaacacccacccgccacagcgatacaaggaccctgctgtctccaagcggcaggaacaacaggaacgagggaaccctggattctcgcaggaccacaacccggcacagcaagacaatggaggagctgaagctgccagagcacatggactcctctcactcccactctctgagcgccccccacgagtccttctcttacggcctgggatacacctcccccttcagctcccagcagaggccccacaggcactctatgtacgtgacacgcgacaaggtgagggccaagggcctggatggaagcctgtccatcggccagggaatggccgctagggctaactccctgcagctgctgtctcctcagccaggagagcagctgccaccagagatgaccgtggctcgctctagcgtgaaggagacaagcagggagggcacctcctctttccacacacgccagaagtccgagggcggagtgtaccacgacccccactctgacgatggaacagctcctaaggagaacaggcacctgtacaacgatcccgtgcctagacgggtgggctccttctacagagtgccatctccccggcctgacaacagctttcacgagaacaacgtgtccacccgcgtgagctccctgccatctgagtctagctccggaacaaaccactctaagaggcagcccgccttcgatccttggaagagcccagagaacatctctcacagcgagcagctgaaggagaaggagaagcagggcttctttagaagcatgaagaagaagaagaagaagagccagaccgtgcctaactccgactctccagatctgctgaccctgcagaagtccatccacagcgcctccacaccatctagccgccctaaggagtggaggcctgagaagatcagcgatctgcagacacagagccagccactgaagtccctgcggaagctgctgcacctgtcctctgccagcaaccaccccgctagctccgacccaagattccagcccctgacagcccagcagaccaagaactcttttagcgagatccggatccaccctctgtcccaggcttctggcggatctagcaacatcagacaggagccagctccaaagggccggcccgctctgcagctgcctggccagatggacccaggatggcacgtgtcctctgtgacaaggtccgccaccgagggaccatcctactctgagcagctgggcgctaagtctggccctaacggacacccatacaataggactaatcgcagcagaatgcccaacctgaacgacctcaaggaaacagcactctgataagcggccgcaactcgagactctagacgactgtgccttctagttgccagccatctgttgtttgcccctcccccgtgccttccttgaccctggaaggtgccactcccactgtcctttcctaataaaatgaggaaattgcatcgcattgtctgagtaggtgtcattctattctggggggtggggtggggcaggacagcaagggggaggattgggaagacaatagcaggcatgctggggatgcggtgggctctatggccgcgggccgcaggaacccctagtgatggagttggccactccctctctgcgcgctcgctcgctcactgaggccgggcgaccaaaggtcgcccgacgcccgggctttgcccgggcggcctcagtgagcgagcgagcgcgcagctgcctgcaggggcgcctgatgcggtattttctccttacgcatctgtgcggtatttcacaccgcatacgtcaaagcaaccatagtacgcgccctgtagcggcgcattaagcgcggcgggtgtggtggttacgcgcagcgtgaccgctacacttgccagcgccctagcgcccgctcctttcgctttcttcccttcctttctcgccacgttcgccggctttccccgtcaagctctaaatcgggggctccctttagggttccgatttagtgctttacggcacctcgaccccaaaaaacttgatttgggtgatggttcacgtagtgggccatcgccctgatagacggtttttcgccctttgacgttggagtccacgttctttaatagtggactcttgttccaaactggaacaacactcaaccctatctcgggctattcttttgatttataagggattttgccgatttcggcctattggttaaaaaatgagctgatttaacaaaaatttaacgcgaattttaacaaaatattaacgtttacaattttatggtgcactctcagtacaatctgctctgatgccgcatagttaagccagccccgacacccgccaacacccgctgacgcgccctgacgggcttgtctgctcccggcatccgcttacagacaagctgtgaccgtctccgggagctgcatgtgtcagaggttttcaccgtcatcaccgaaacgcgcgagacgaaagggcctcgtgatacgcctatttttataggttaatgtcatgataataatggtttcttagacgtcaggtggcacttttcggggaaatgtgcgcggaacccctatttgtttatttttctaaatacattcaaatatgtatccgctcatgagacaataaccctgataaatgcttcaataatattgaaaaaggaagagtatgagtattcaacatttccgtgtcgcccttattcccttttttgcggcattttgccttcctgtttttgctcacccagaaacgctggtgaaagtaaaagatgctgaagatcagttgggtgcacgagtgggttacatcgaactggatctcaacagcggtaagatccttgagagttttcgccccgaagaacgttttccaatgatgagcacttttaaagttctgctatgtggcgcggtattatcccgtattgacgccgggcaagagcaactcggtcgccgcatacactattctcagaatgacttggttgagtactcaccagtcacagaaaagcatcttacggatggcatgacagtaagagaattatgcagtgctgccataaccatgagtgataacactgcggccaacttacttctgacaacgatcggaggaccgaaggagctaaccgcttttttgcacaacatgggggatcatgtaactcgccttgatcgttgggaaccggagctgaatgaagccataccaaacgacgagcgtgacaccacgatgcctgtagcaatggcaacaacgttgcgcaaactattaactggcgaactacttactctagcttcccggcaacaattaatagactggatggaggcggataaagttgcaggaccacttctgcgctcggcccttccggctggctggtttattgctgataaatctggagccggtgagcgtgggtctcgcggtatcattgcagcactggggccagatggtaagccctcccgtatcgtagttatctacacgacggggagtcaggcaactatggatgaacgaaatagacagatcgctgagataggtgcctcactgattaagcattggtaactgtcagaccaagtttactcatatatactttagattgatttaaaacttcatttttaatttaaaaggatctaggtgaagatcctttttgataatctcatgaccaaaatcccttaacgtgagttttcgttccactgagcgtcagaccccgtagaaaagatcaaaggatcttcttgagatcctttttttctgcgcgtaatctgctgcttgcaaacaaaaaaaccaccgctaccagcggtggtttgtttgccggatcaagagctaccaactctttttccgaaggtaactggcttcagcagagcgcagataccaaatactgtccttctagtgtagccgtagttaggccaccacttcaagaactctgtagcaccgcctacatacctcgctctgctaatcctgttaccagtggctgctgccagtggcgataagtcgtgtcttaccgggttggactcaagacgatagttaccggataaggcgcagcggtcgggctgaacggggggttcgtgcacacagcccagcttggagcgaacgacctacaccgaactgagatacctacagcgtgagctatgagaaagcgccacgcttcccgaagggagaaaggcggacaggtatccggtaagcggcagggtcggaacaggagagcgcacgagggagcttccagggggaaacgcctggtatctttatagtcctgtcgggtttcgccacctctgacttgagcgtcgatttttgtgatgctcgtcaggggggcggagcctatggaaaaacgccagcaacgcggcctttttacggttcctggccttttgctggccttttgctcacatgt

SEQ ID NO: 112 - DNA, 4906 bp, Artificial Sequence
  AAVC-CBh-mBPIP-TATkappa28-eGFP
cctgcaggcagctgcgcgctcgctcgctcactgaggccgcccgggcaaagcccgggcgtcgggcgacctttggtcgcccggcctcagtgagcgagcgagcgcgcagagagggagtggccaactccatcactaggggttcctgcggcctaaggcaattgttaatagtaatcaattacggggtcattagttcatagcccatatatggagttccgcgttacataacttacggtaaatggcccgcctggctgaccgcccaacgacccccgcccattgacgtcaataatgacgtatgttcccatagtaacgccaatagggactttccattgacgtcaatgggtggagtatttacggtaaactgcccacttggcagtacatcaagtgtatcatatgccaagtacgccccctattgacgtcaatgacggtaaatggcccgcctggcattatgcccagtacatgaccttacgggactttcctacttggcagtacatctccacgttctgcttcactctccccatctcccccccctccccacccccaattttgtatttatttattttttaattattttgtgcagcgatgggggcggggggggggggggcgcgcgccaggcggggcggggcggggcgaggggcggggcggggcgaggcggagaggtgcggcggcagccaatcagagcggcgcgctccgaaagtttccttttatggcgaggcggcggcggcggcggccctataaaaagcgaagcgcgcggcggggagtcgctgcgttgccttcgccccgtgccccgctccgcgccgcctcgcgccgcccgccccggctctgactgaccgcgttactcccacaggtgagcgggcgggacggcccttctcctccgggctgtaattagcaagaggtaagggtttaagggatggttggttggtggggtattaatgtttaattacctgttttacaggcctgaaatcacttggttttaggttgggctagccaaagcttgccgccaccatgaaactgtccctggtcgccgccatgctgctcctcctgtcactggtcgccgctatgctgctcctcctctccgctgctcgggctggggacgctgctcagccagctaggagagctaggaggaccaagctggctgcttacgctaggaaggctgctaggcaggctagagctggaggaggcggatctatggtgagcaagggagaggagctgttcacaggcgtggtgcccatcctggtggagctggacggagatgtgaacggccacaagtttagcgtgtccggagagggagagggcgacgctacctacggaaagctgacactgaagttcatctgcaccacaggcaagctgcccgtgccttggccaaccctggtgaccacactgacatacggcgtgcagtgtttttccaggtacccagaccacatgaagcagcacgatttctttaagtctgccatgcccgagggatacgtgcaggagcggaccatcttctttaaggacgatggcaactacaagacccgcgctgaggtgaagttcgagggagacacactggtgaacaggatcgagctgaagggcatcgactttaaggaggatggaaacatcctgggccacaagctggagtacaactacaacagccacaacgtgtacatcatggccgataagcagaagaacggaatcaaggtgaacttcaagatcagacacaacatcgaggacggctccgtgcagctggctgatcactaccagcagaacacccctatcggagacggacccgtgctgctgcctgataaccactacctgtccacacagtctgccctgagcaaggacccaaacgagaagcgggatcacatggtgctgctggaatttgtgactgctgctggtattacactgggtatggatgaactctataaatgataagcggccgcaactcgagactctagacgactgtgccttctagttgccagccatctgttgtttgcccctcccccgtgccttccttgaccctggaaggtgccactcccactgtcctttcctaataaaatgaggaaattgcatcgcattgtctgagtaggtgtcattctattctggggggtggggtggggcaggacagcaagggggaggattgggaagacaatagcaggcatgctggggatgcggtgggctctatggccgcgggccgcaggaacccctagtgatggagttggccactccctctctgcgcgctcgctcgctcactgaggccgggcgaccaaaggtcgcccgacgcccgggctttgcccgggcggcctcagtgagcgagcgagcgcgcagctgcctgcaggggcgcctgatgcggtattttctccttacgcatctgtgcggtatttcacaccgcatacgtcaaagcaaccatagtacgcgccctgtagcggcgcattaagcgcggcgggtgtggtggttacgcgcagcgtgaccgctacacttgccagcgccctagcgcccgctcctttcgctttcttcccttcctttctcgccacgttcgccggctttccccgtcaagctctaaatcgggggctccctttagggttccgatttagtgctttacggcacctcgaccccaaaaaacttgatttgggtgatggttcacgtagtgggccatcgccctgatagacggtttttcgccctttgacgttggagtccacgttctttaatagtggactcttgttccaaactggaacaacactcaaccctatctcgggctattcttttgatttataagggattttgccgatttcggcctattggttaaaaaatgagctgatttaacaaaaatttaacgcgaattttaacaaaatattaacgtttacaattttatggtgcactctcagtacaatctgctctgatgccgcatagttaagccagccccgacacccgccaacacccgctgacgcgccctgacgggcttgtctgctcccggcatccgcttacagacaagctgtgaccgtctccgggagctgcatgtgtcagaggttttcaccgtcatcaccgaaacgcgcgagacgaaagggcctcgtgatacgcctatttttataggttaatgtcatgataataatggtttcttagacgtcaggtggcacttttcggggaaatgtgcgcggaacccctatttgtttatttttctaaatacattcaaatatgtatccgctcatgagacaataaccctgataaatgcttcaataatattgaaaaaggaagagtatgagtattcaacatttccgtgtcgcccttattcccttttttgcggcattttgccttcctgtttttgctcacccagaaacgctggtgaaagtaaaagatgctgaagatcagttgggtgcacgagtgggttacatcgaactggatctcaacagcggtaagatccttgagagttttcgccccgaagaacgttttccaatgatgagcacttttaaagttctgctatgtggcgcggtattatcccgtattgacgccgggcaagagcaactcggtcgccgcatacactattctcagaatgacttggttgagtactcaccagtcacagaaaagcatcttacggatggcatgacagtaagagaattatgcagtgctgccataaccatgagtgataacactgcggccaacttacttctgacaacgatcggaggaccgaaggagctaaccgcttttttgcacaacatgggggatcatgtaactcgccttgatcgttgggaaccggagctgaatgaagccataccaaacgacgagcgtgacaccacgatgcctgtagcaatggcaacaacgttgcgcaaactattaactggcgaactacttactctagcttcccggcaacaattaatagactggatggaggcggataaagttgcaggaccacttctgcgctcggcccttccggctggctggtttattgctgataaatctggagccggtgagcgtgggtctcgcggtatcattgcagcactggggccagatggtaagccctcccgtatcgtagttatctacacgacggggagtcaggcaactatggatgaacgaaatagacagatcgctgagataggtgcctcactgattaagcattggtaactgtcagaccaagtttactcatatatactttagattgatttaaaacttcatttttaatttaaaaggatctaggtgaagatcctttttgataatctcatgaccaaaatcccttaacgtgagttttcgttccactgagcgtcagaccccgtagaaaagatcaaaggatcttcttgagatcctttttttctgcgcgtaatctgctgcttgcaaacaaaaaaaccaccgctaccagcggtggtttgtttgccggatcaagagctaccaactctttttccgaaggtaactggcttcagcagagcgcagataccaaatactgtccttctagtgtagccgtagttaggccaccacttcaagaactctgtagcaccgcctacatacctcgctctgctaatcctgttaccagtggctgctgccagtggcgataagtcgtgtcttaccgggttggactcaagacgatagttaccggataaggcgcagcggtcgggctgaacggggggttcgtgcacacagcccagcttggagcgaacgacctacaccgaactgagatacctacagcgtgagctatgagaaagcgccacgcttcccgaagggagaaaggcggacaggtatccggtaagcggcagggtcggaacaggagagcgcacgagggagcttccagggggaaacgcctggtatctttatagtcctgtcgggtttcgccacctctgacttgagcgtcgatttttgtgatgctcgtcaggggggcggagcctatggaaaaacgccagcaacgcggcctttttacggttcctggccttttgctggccttttgctcacatgt

SEQ ID NO: 113 - DNA, 4966 bp, Artificial Sequence
  AAVC-CBh- mBPIP-TATkappa28-NLS-eGFP
cctgcaggcagctgcgcgctcgctcgctcactgaggccgcccgggcaaagcccgggcgtcgggcgacctttggtcgcccggcctcagtgagcgagcgagcgcgcagagagggagtggccaactccatcactaggggttcctgcggcctaaggcaattgttaatagtaatcaattacggggtcattagttcatagcccatatatggagttccgcgttacataacttacggtaaatggcccgcctggctgaccgcccaacgacccccgcccattgacgtcaataatgacgtatgttcccatagtaacgccaatagggactttccattgacgtcaatgggtggagtatttacggtaaactgcccacttggcagtacatcaagtgtatcatatgccaagtacgccccctattgacgtcaatgacggtaaatggcccgcctggcattatgcccagtacatgaccttacgggactttcctacttggcagtacatctccacgttctgcttcactctccccatctcccccccctccccacccccaattttgtatttatttattttttaattattttgtgcagcgatgggggcggggggggggggggcgcgcgccaggcggggcggggcggggcgaggggcggggcggggcgaggcggagaggtgcggcggcagccaatcagagcggcgcgctccgaaagtttccttttatggcgaggcggcggcggcggcggccctataaaaagcgaagcgcgcggcggggagtcgctgcgttgccttcgccccgtgccccgctccgcgccgcctcgcgccgcccgccccggctctgactgaccgcgttactcccacaggtgagcgggcgggacggcccttctcctccgggctgtaattagcaagaggtaagggtttaagggatggttggttggtggggtattaatgtttaattacctgttttacaggcctgaaatcacttggttttaggttgggctagccaaagcttgccgccaccatgaaactcagtctggtcgccgctatgctcctgctcctctccctggtcgccgctatgctcctgctcctgtctgctgcccgcgctggggacgctgctcagccagctaggagagctaggaggaccaagctggctgcttacgctagaaaggctgctaggcaggctagagctggaggaggaggatccatggctcccaagaagaagaggaaggtgcgctaccccgccttcctgtacaaggtggctaccatggtgtctaagggagaggagctgtttacaggcgtggtgcccatcctggtggagctggacggagatgtgaacggccacaagttcagcgtgtccggagagggagagggcgacgccacctacggaaagctgacactgaagtttatctgcaccacaggcaagctgcccgtgccttggccaaccctggtgaccacactgacatacggcgtgcagtgtttctctcggtaccctgaccacatgaagcagcacgatttctttaagagcgccatgccagagggatacgtgcaggagaggacaatcttctttaaggacgatggcaactacaagaccagagctgaggtgaagttcgagggagacacactggtgaaccggatcgagctgaagggcatcgactttaaggaggatggaaacatcctgggccacaagctggagtacaactacaacagccacaacgtgtacatcatggccgataagcagaagaacggaatcaaggtgaactttaagatccgccacaacatcgaggacggctccgtgcagctggctgatcactaccagcagaacaccccaatcggagacggacccgtgctgctgcctgataaccactacctgtctacacagagcgccctgtccaaggaccctaacgagaagagggatcacatggtcctcctggaatttgtgactgctgctgggattactctcggtatggatgaactgtataaatgataagcggccgcaactcgagactctagacgactgtgccttctagttgccagccatctgttgtttgcccctcccccgtgccttccttgaccctggaaggtgccactcccactgtcctttcctaataaaatgaggaaattgcatcgcattgtctgagtaggtgtcattctattctggggggtggggtggggcaggacagcaagggggaggattgggaagacaatagcaggcatgctggggatgcggtgggctctatggccgcgggccgcaggaacccctagtgatggagttggccactccctctctgcgcgctcgctcgctcactgaggccgggcgaccaaaggtcgcccgacgcccgggctttgcccgggcggcctcagtgagcgagcgagcgcgcagctgcctgcaggggcgcctgatgcggtattttctccttacgcatctgtgcggtatttcacaccgcatacgtcaaagcaaccatagtacgcgccctgtagcggcgcattaagcgcggcgggtgtggtggttacgcgcagcgtgaccgctacacttgccagcgccctagcgcccgctcctttcgctttcttcccttcctttctcgccacgttcgccggctttccccgtcaagctctaaatcgggggctccctttagggttccgatttagtgctttacggcacctcgaccccaaaaaacttgatttgggtgatggttcacgtagtgggccatcgccctgatagacggtttttcgccctttgacgttggagtccacgttctttaatagtggactcttgttccaaactggaacaacactcaaccctatctcgggctattcttttgatttataagggattttgccgatttcggcctattggttaaaaaatgagctgatttaacaaaaatttaacgcgaattttaacaaaatattaacgtttacaattttatggtgcactctcagtacaatctgctctgatgccgcatagttaagccagccccgacacccgccaacacccgctgacgcgccctgacgggcttgtctgctcccggcatccgcttacagacaagctgtgaccgtctccgggagctgcatgtgtcagaggttttcaccgtcatcaccgaaacgcgcgagacgaaagggcctcgtgatacgcctatttttataggttaatgtcatgataataatggtttcttagacgtcaggtggcacttttcggggaaatgtgcgcggaacccctatttgtttatttttctaaatacattcaaatatgtatccgctcatgagacaataaccctgataaatgcttcaataatattgaaaaaggaagagtatgagtattcaacatttccgtgtcgcccttattcccttttttgcggcattttgccttcctgtttttgctcacccagaaacgctggtgaaagtaaaagatgctgaagatcagttgggtgcacgagtgggttacatcgaactggatctcaacagcggtaagatccttgagagttttcgccccgaagaacgttttccaatgatgagcacttttaaagttctgctatgtggcgcggtattatcccgtattgacgccgggcaagagcaactcggtcgccgcatacactattctcagaatgacttggttgagtactcaccagtcacagaaaagcatcttacggatggcatgacagtaagagaattatgcagtgctgccataaccatgagtgataacactgcggccaacttacttctgacaacgatcggaggaccgaaggagctaaccgcttttttgcacaacatgggggatcatgtaactcgccttgatcgttgggaaccggagctgaatgaagccataccaaacgacgagcgtgacaccacgatgcctgtagcaatggcaacaacgttgcgcaaactattaactggcgaactacttactctagcttcccggcaacaattaatagactggatggaggcggataaagttgcaggaccacttctgcgctcggcccttccggctggctggtttattgctgataaatctggagccggtgagcgtgggtctcgcggtatcattgcagcactggggccagatggtaagccctcccgtatcgtagttatctacacgacggggagtcaggcaactatggatgaacgaaatagacagatcgctgagataggtgcctcactgattaagcattggtaactgtcagaccaagtttactcatatatactttagattgatttaaaacttcatttttaatttaaaaggatctaggtgaagatcctttttgataatctcatgaccaaaatcccttaacgtgagttttcgttccactgagcgtcagaccccgtagaaaagatcaaaggatcttcttgagatcctttttttctgcgcgtaatctgctgcttgcaaacaaaaaaaccaccgctaccagcggtggtttgtttgccggatcaagagctaccaactctttttccgaaggtaactggcttcagcagagcgcagataccaaatactgtccttctagtgtagccgtagttaggccaccacttcaagaactctgtagcaccgcctacatacctcgctctgctaatcctgttaccagtggctgctgccagtggcgataagtcgtgtcttaccgggttggactcaagacgatagttaccggataaggcgcagcggtcgggctgaacggggggttcgtgcacacagcccagcttggagcgaacgacctacaccgaactgagatacctacagcgtgagctatgagaaagcgccacgcttcccgaagggagaaaggcggacaggtatccggtaagcggcagggtcggaacaggagagcgcacgagggagcttccagggggaaacgcctggtatctttatagtcctgtcgggtttcgccacctctgacttgagcgtcgatttttgtgatgctcgtcaggggggcggagcctatggaaaaacgccagcaacgcggcctttttacggttcctggccttttgctggccttttgctcacatgt

SEQ ID NO: 114 - DNA, 6640 bp, Artificial Sequence
  AAVC-Syn-hCDKL5-107
cctgcaggcagctgcgcgctcgctcgctcactgaggccgcccgggcaaagcccgggcgtcgggcgacctttggtcgcccggcctcagtgagcgagcgagcgcgcagagagggagtggccaactccatcactaggggttcctgcggcctaaggcaattgactacaaaccgagtatctgcagagggccctgcgtatgagtgcaagtgggttttaggaccaggatgaggcggggtgggggtgcctacctgacgaccgaccccgacccactggacaagcacccaacccccattccccaaattgcgcatcccctatcagagagggggaggggaaacaggatgcggcgaggcgcgtgcgcactgccagcttcagcaccgcggacagtgccttcgcccccgcctggcggcgcgcgccaccgccgcctcagcactgaaggcgcgctgacgtcactcgccggtcccccgcaaactccccttcccggccaccttggtcgcgtccgcgccgccgccggcccagccggaccgcaccacgcgaggcgcgagataggggggcacgggcgcgaccatctgcgctgcggcgccggcgactcagcgctgcctcagtctgcggtgggcagcggaggagtcgtgtcgtgcctgagagcgcagctgtgctcctgggcaccgcgcagtccgcccccgcggctcctggccagaccacccctaggaccccctgccccaagtcgcagccttcgagctagccaaagcttgccgccaccatgaaaatccctaacattggtaacgtgatgaacaagtttgaaatcctcggggtcgtcggagaaggtgcctacggggtcgtgctgaagtgcagacacaaggagacacacgagatcgtggccatcaagaagttcaaggatagcgaggagaacgaggaggtgaaggagacaaccctgagagagctgaagatgctgcggacactgaagcaggagaacatcgtggagctgaaggaggctttcaggagacggggaaagctgtacctggtgtttgagtacgtggagaagaacatgctggagctgctggaggagatgcctaacggcgtgccccctgagaaggtgaagtcctacatctaccagctgatcaaggccatccactggtgccacaagaacgacatcgtgcacagagatatcaagccagagaacctgctgatctcccacaacgacgtgctgaagctgtgcgatttcggctttgcccggaacctgagcgagggaaacaacgccaactacacagagtacgtggctaccagatggtaccggagcccagagctgctgctgggagctccatacggaaagagcgtggacatgtggtccgtgggctgcatcctgggagagctgtctgacggccagcctctgttcccaggagagagcgagatcgatcagctgtttaccatccagaaggtgctgggccctctgccaagcgagcagatgaagctgttctactccaaccctagattccacggactgcggtttcccgccgtgaaccaccctcagagcctggagcgcaggtacctgggcatcctgaactccgtgctgctggatctgatgaagaacctgctgaagctggaccccgccgatagatacctgaccgagcagtgtctgaaccaccctacatttcagacccagcgcctgctggacaggagcccttccagatctgctaagcggaagccataccacgtggagagctccaccctgtccaacagaaaccaggccggcaagtctacagctctgcagagccaccaccggagcaactccaaggacatccagaacctgtctgtgggcctgcctagggctgatgagggactgccagctaacgagagcttcctgaacggcaacctggccggagcttctctgagcccactgcacacaaagacctaccaggcctctagccagcccggctccacatctaaggacctgaccaacaacaacatcccacacctgctgtctcccaaggaggctaagagcaagaccgagttcgactttaacatcgatcccaagcctagcgagggcccaggaacaaagtacctgaagagcaactcccgctctcagcagaacaggcactccttcatggagtcctctcagtctaaggccggcaccctgcagcccaacgagaagcagagcaggcactcctacatcgataccatcccccagagctccagaagcccttcctaccggacaaaggccaagagccacggcgctctgtctgacagcaagtccgtgtctaacctgtccgaggctagggctcagatcgctgagccaagcacctccaggtactttccttctagctgtctggacctgaactctcctacaagcccaacacccacccgccactccgatacaaggaccctgctgtctccaagcggcaggaacaacaggaacgagggaaccctggattctagacggaccacaacccgccacagcaagacaatggaggagctgaagctgccagagcacatggactcctctcactcccactctctgagcgccccccacgagtccttctcttacggcctgggatacacctcccccttcagctcccagcagaggccccacaggcactctatgtacgtgacacgcgacaaggtgagggccaagggcctggatggaagcctgtccatcggacagggaatggctgctagggctaactccctgcagctgctgtctcctcagccaggagagcagctgccaccagagatgaccgtggctcgctctagcgtgaaggagacaagcagggagggcacctcctctttccacacacgccagaagtccgagggcggagtgtaccacgacccccactctgacgatggaacagctcctaaggagaacaggcacctgtacaacgatcccgtgcctcgcagggtgggctccttctacagagtgccatctccccggcctgacaacagctttcacgagaacaacgtgtccacccgcgtgagctccctgccttctgagtctagctccggaacaaaccactctaagaggcagcccgcctttgacccttggaagagcccagagaacatctctcacagcgagcagctgaaggagaaggagaagcagggcttctttcgcagcatgaagaagaagaagaagaagagccagaccgtgcctaactccgactctccagatctgctgaccctgcagaagtccatccacagcgcctccacaccatctagccgccctaaggagtggaggcctgagaagatcagcgatctgcagacacagagccagccactgaagtccctgaggaagctgctgcacctgtcctctgccagcaaccaccccgctagctccgacccaagattccagcccctgacagcccagcagaccaagaactcttttagcgagatccggatccaccctctgtcccaggcttctggcggatctagcaacatcagacaggagccagctccaaagggccggcccgctctgcagctgcctggccagatggacccaggatggcacgtgtcctctgtgacaagatccgccaccgagggaccatcctactctgagcagctgggcgctaagtctggccctaacggacacccatacaataggactaatagaagcagaatgccaaacctcaatgacctcaaggaaacagcactctgataagcggccgcaactcgagactctagacgactgtgccttctagttgccagccatctgttgtttgcccctcccccgtgccttccttgaccctggaaggtgccactcccactgtcctttcctaataaaatgaggaaattgcatcgcattgtctgagtaggtgtcattctattctggggggtggggtggggcaggacagcaagggggaggattgggaagacaatagcaggcatgctggggatgcggtgggctctatggccgcgggccgcaggaacccctagtgatggagttggccactccctctctgcgcgctcgctcgctcactgaggccgggcgaccaaaggtcgcccgacgcccgggctttgcccgggcggcctcagtgagcgagcgagcgcgcagctgcctgcaggggcgcctgatgcggtattttctccttacgcatctgtgcggtatttcacaccgcatacgtcaaagcaaccatagtacgcgccctgtagcggcgcattaagcgcggcgggtgtggtggttacgcgcagcgtgaccgctacacttgccagcgccctagcgcccgctcctttcgctttcttcccttcctttctcgccacgttcgccggctttccccgtcaagctctaaatcgggggctccctttagggttccgatttagtgctttacggcacctcgaccccaaaaaacttgatttgggtgatggttcacgtagtgggccatcgccctgatagacggtttttcgccctttgacgttggagtccacgttctttaatagtggactcttgttccaaactggaacaacactcaaccctatctcgggctattcttttgatttataagggattttgccgatttcggcctattggttaaaaaatgagctgatttaacaaaaatttaacgcgaattttaacaaaatattaacgtttacaattttatggtgcactctcagtacaatctgctctgatgccgcatagttaagccagccccgacacccgccaacacccgctgacgcgccctgacgggcttgtctgctcccggcatccgcttacagacaagctgtgaccgtctccgggagctgcatgtgtcagaggttttcaccgtcatcaccgaaacgcgcgagacgaaagggcctcgtgatacgcctatttttataggttaatgtcatgataataatggtttcttagacgtcaggtggcacttttcggggaaatgtgcgcggaacccctatttgtttatttttctaaatacattcaaatatgtatccgctcatgagacaataaccctgataaatgcttcaataatattgaaaaaggaagagtatgagtattcaacatttccgtgtcgcccttattcccttttttgcggcattttgccttcctgtttttgctcacccagaaacgctggtgaaagtaaaagatgctgaagatcagttgggtgcacgagtgggttacatcgaactggatctcaacagcggtaagatccttgagagttttcgccccgaagaacgttttccaatgatgagcacttttaaagttctgctatgtggcgcggtattatcccgtattgacgccgggcaagagcaactcggtcgccgcatacactattctcagaatgacttggttgagtactcaccagtcacagaaaagcatcttacggatggcatgacagtaagagaattatgcagtgctgccataaccatgagtgataacactgcggccaacttacttctgacaacgatcggaggaccgaaggagctaaccgcttttttgcacaacatgggggatcatgtaactcgccttgatcgttgggaaccggagctgaatgaagccataccaaacgacgagcgtgacaccacgatgcctgtagcaatggcaacaacgttgcgcaaactattaactggcgaactacttactctagcttcccggcaacaattaatagactggatggaggcggataaagttgcaggaccacttctgcgctcggcccttccggctggctggtttattgctgataaatctggagccggtgagcgtgggtctcgcggtatcattgcagcactggggccagatggtaagccctcccgtatcgtagttatctacacgacggggagtcaggcaactatggatgaacgaaatagacagatcgctgagataggtgcctcactgattaagcattggtaactgtcagaccaagtttactcatatatactttagattgatttaaaacttcatttttaatttaaaaggatctaggtgaagatcctttttgataatctcatgaccaaaatcccttaacgtgagttttcgttccactgagcgtcagaccccgtagaaaagatcaaaggatcttcttgagatcctttttttctgcgcgtaatctgctgcttgcaaacaaaaaaaccaccgctaccagcggtggtttgtttgccggatcaagagctaccaactctttttccgaaggtaactggcttcagcagagcgcagataccaaatactgtccttctagtgtagccgtagttaggccaccacttcaagaactctgtagcaccgcctacatacctcgctctgctaatcctgttaccagtggctgctgccagtggcgataagtcgtgtcttaccgggttggactcaagacgatagttaccggataaggcgcagcggtcgggctgaacggggggttcgtgcacacagcccagcttggagcgaacgacctacaccgaactgagatacctacagcgtgagctatgagaaagcgccacgcttcccgaagggagaaaggcggacaggtatccggtaagcggcagggtcggaacaggagagcgcacgagggagcttccagggggaaacgcctggtatctttatagtcctgtcgggtttcgccacctctgacttgagcgtcgatttttgtgatgctcgtcaggggggcggagcctatggaaaaacgccagcaacgcggcctttttacggttcctggccttttgctggccttttgctcacatgt

SEQ ID NO: 115 - DNA, 6640 bp, Artificial Sequence
  AAVC-Syn-hCDKL5-107(dead kinase)
cctgcaggcagctgcgcgctcgctcgctcactgaggccgcccgggcaaagcccgggcgtcgggcgacctttggtcgcccggcctcagtgagcgagcgagcgcgcagagagggagtggccaactccatcactaggggttcctgcggcctaaggcaattgactacaaaccgagtatctgcagagggccctgcgtatgagtgcaagtgggttttaggaccaggatgaggcggggtgggggtgcctacctgacgaccgaccccgacccactggacaagcacccaacccccattccccaaattgcgcatcccctatcagagagggggaggggaaacaggatgcggcgaggcgcgtgcgcactgccagcttcagcaccgcggacagtgccttcgcccccgcctggcggcgcgcgccaccgccgcctcagcactgaaggcgcgctgacgtcactcgccggtcccccgcaaactccccttcccggccaccttggtcgcgtccgcgccgccgccggcccagccggaccgcaccacgcgaggcgcgagataggggggcacgggcgcgaccatctgcgctgcggcgccggcgactcagcgctgcctcagtctgcggtgggcagcggaggagtcgtgtcgtgcctgagagcgcagctgtgctcctgggcaccgcgcagtccgcccccgcggctcctggccagaccacccctaggaccccctgccccaagtcgcagccttcgagctagccaaagcttgccgccaccatgaaaatccctaatatcggaaatgtgatgaataagtttgaaatcctcggggtcgtcggagaaggtgcctacggggtcgtcctgaaatgcagacacaaggagacacacgagatcgtggccatcaggagattcaaggatagcgaggagaacgaggaggtgaaggagacaaccctgcgcgagctgaagatgctgaggacactgaagcaggagaacatcgtggagctgaaggaggctttccggcgcaggggaaagctgtacctggtgtttgagtacgtggagaagaacatgctggagctgctggaggagatgcctaacggcgtgccccctgagaaggtgaagtcctacatctaccagctgatcaaggccatccactggtgccacaagaacgacatcgtgcaccgcgatatcaagccagagaacctgctgatctcccacaacgacgtgctgaagctgtgcgatttcggctttgccaggaacctgagcgagggaaacaacgccaactacacagagtacgtggctacccgctggtacaggagcccagagctgctgctgggagctccatacggaaagagcgtggacatgtggtccgtgggctgcatcctgggagagctgtctgacggccagcctctgttcccaggagagagcgagatcgatcagctgtttaccatccagaaggtgctgggccctctgccaagcgagcagatgaagctgttctactccaaccctcgcttccacggactgaggtttcccgccgtgaaccaccctcagagcctggagagacggtacctgggcatcctgaactccgtgctgctggatctgatgaagaacctgctgaagctggaccccgccgatcgctacctgaccgagcagtgtctgaaccaccctacatttcagacccagagactgctggaccggagcccttcccgctctgctaagaggaagccataccacgtggagagctccaccctgtccaaccgcaaccaggccggcaagtctacagctctgcagagccaccacaggagcaactccaaggacatccagaacctgtctgtgggcctgcctagggctgatgagggactgccagctaacgagagcttcctgaacggcaacctggccggagcttctctgagcccactgcacacaaagacctaccaggcctctagccagcccggctccacatctaaggacctgaccaacaacaacatcccacacctgctgtctcccaaggaggctaagagcaagaccgagttcgactttaacatcgatcccaagcctagcgagggcccaggaacaaagtacctgaagagcaactccagatctcagcagaaccggcactccttcatggagtcctctcagtctaaggccggcaccctgcagcccaacgagaagcagagcaggcactcctacatcgataccatcccccagagctcccgcagcccttcctacaggacaaaggccaagagccacggcgctctgtctgacagcaagtccgtgtctaacctgtccgaggccagagctcagatcgctgagcccagcacctcccggtactttccttctagctgtctggacctgaactctcctacaagcccaacacccaccagacactccgatacacggaccctgctgtctccaagcggcagaaacaaccggaacgagggaaccctggattctcgcaggaccacaaccagacacagcaagacaatggaggagctgaagctgccagagcacatggactcctctcactcccactctctgagcgccccccacgagtccttctcttacggcctgggatacacctcccccttcagctcccagcagcgcccccacaggcactctatgtacgtgacaagagacaaggtgcgggccaagggcctggatggaagcctgtccatcggccagggaatggccgctagggctaactccctgcagctgctgtctcctcagccaggagagcagctgccacccgagatgaccgtggccagatctagcgtgaaggagacaagccgggagggcacctcctctttccacacaagacagaagtccgagggcggagtgtaccacgacccccactctgacgatggaacagctcctaaggagaaccggcacctgtacaacgatcccgtgcctagacgggtgggctccttctaccgcgtgccatctcccaggcctgacaacagctttcacgagaacaacgtgtccaccagagtgagctccctgccttctgagtctagctccggaacaaaccactctaagcggcagcccgcctttgacccttggaagagcccagagaacatctctcacagcgagcagctgaaggagaaggagaagcagggcttctttagaagcatgaagaagaagaagaagaagagccagaccgtgcctaactccgactctccagatctgctgaccctgcagaagtccatccacagcgcctccacaccctctagcagacctaaggagtggcggcctgagaagatcagcgatctgcagacacagagccagccactgaagtccctgcggaagctgctgcacctgtcctctgccagcaaccacccagctagctccgacccaaggttccagccactgacagctcagcagaccaagaactcttttagcgagatcaggatccaccctctgtcccaggcttctggcggatctagcaacatcaggcaggagccagctccaaagggcaggcccgctctgcagctgcctggacagatggacccaggatggcacgtgtcctctgtgacaagatccgccaccgagggaccatcctactctgagcagctgggcgctaagtctggccctaacggacacccatacaacagaacaaacagaagcagaatgcccaacctcaatgacctcaaagaaacagcactctgataagcggccgcaactcgagactctagacgactgtgccttctagttgccagccatctgttgtttgcccctcccccgtgccttccttgaccctggaaggtgccactcccactgtcctttcctaataaaatgaggaaattgcatcgcattgtctgagtaggtgtcattctattctggggggtggggtggggcaggacagcaagggggaggattgggaagacaatagcaggcatgctggggatgcggtgggctctatggccgcgggccgcaggaacccctagtgatggagttggccactccctctctgcgcgctcgctcgctcactgaggccgggcgaccaaaggtcgcccgacgcccgggctttgcccgggcggcctcagtgagcgagcgagcgcgcagctgcctgcaggggcgcctgatgcggtattttctccttacgcatctgtgcggtatttcacaccgcatacgtcaaagcaaccatagtacgcgccctgtagcggcgcattaagcgcggcgggtgtggtggttacgcgcagcgtgaccgctacacttgccagcgccctagcgcccgctcctttcgctttcttcccttcctttctcgccacgttcgccggctttccccgtcaagctctaaatcgggggctccctttagggttccgatttagtgctttacggcacctcgaccccaaaaaacttgatttgggtgatggttcacgtagtgggccatcgccctgatagacggtttttcgccctttgacgttggagtccacgttctttaatagtggactcttgttccaaactggaacaacactcaaccctatctcgggctattcttttgatttataagggattttgccgatttcggcctattggttaaaaaatgagctgatttaacaaaaatttaacgcgaattttaacaaaatattaacgtttacaattttatggtgcactctcagtacaatctgctctgatgccgcatagttaagccagccccgacacccgccaacacccgctgacgcgccctgacgggcttgtctgctcccggcatccgcttacagacaagctgtgaccgtctccgggagctgcatgtgtcagaggttttcaccgtcatcaccgaaacgcgcgagacgaaagggcctcgtgatacgcctatttttataggttaatgtcatgataataatggtttcttagacgtcaggtggcacttttcggggaaatgtgcgcggaacccctatttgtttatttttctaaatacattcaaatatgtatccgctcatgagacaataaccctgataaatgcttcaataatattgaaaaaggaagagtatgagtattcaacatttccgtgtcgcccttattcccttttttgcggcattttgccttcctgtttttgctcacccagaaacgctggtgaaagtaaaagatgctgaagatcagttgggtgcacgagtgggttacatcgaactggatctcaacagcggtaagatccttgagagttttcgccccgaagaacgttttccaatgatgagcacttttaaagttctgctatgtggcgcggtattatcccgtattgacgccgggcaagagcaactcggtcgccgcatacactattctcagaatgacttggttgagtactcaccagtcacagaaaagcatcttacggatggcatgacagtaagagaattatgcagtgctgccataaccatgagtgataacactgcggccaacttacttctgacaacgatcggaggaccgaaggagctaaccgcttttttgcacaacatgggggatcatgtaactcgccttgatcgttgggaaccggagctgaatgaagccataccaaacgacgagcgtgacaccacgatgcctgtagcaatggcaacaacgttgcgcaaactattaactggcgaactacttactctagcttcccggcaacaattaatagactggatggaggcggataaagttgcaggaccacttctgcgctcggcccttccggctggctggtttattgctgataaatctggagccggtgagcgtgggtctcgcggtatcattgcagcactggggccagatggtaagccctcccgtatcgtagttatctacacgacggggagtcaggcaactatggatgaacgaaatagacagatcgctgagataggtgcctcactgattaagcattggtaactgtcagaccaagtttactcatatatactttagattgatttaaaacttcatttttaatttaaaaggatctaggtgaagatcctttttgataatctcatgaccaaaatcccttaacgtgagttttcgttccactgagcgtcagaccccgtagaaaagatcaaaggatcttcttgagatcctttttttctgcgcgtaatctgctgcttgcaaacaaaaaaaccaccgctaccagcggtggtttgtttgccggatcaagagctaccaactctttttccgaaggtaactggcttcagcagagcgcagataccaaatactgtccttctagtgtagccgtagttaggccaccacttcaagaactctgtagcaccgcctacatacctcgctctgctaatcctgttaccagtggctgctgccagtggcgataagtcgtgtcttaccgggttggactcaagacgatagttaccggataaggcgcagcggtcgggctgaacggggggttcgtgcacacagcccagcttggagcgaacgacctacaccgaactgagatacctacagcgtgagctatgagaaagcgccacgcttcccgaagggagaaaggcggacaggtatccggtaagcggcagggtcggaacaggagagcgcacgagggagcttccagggggaaacgcctggtatctttatagtcctgtcgggtttcgccacctctgacttgagcgtcgatttttgtgatgctcgtcaggggggcggagcctatggaaaaacgccagcaacgcggcctttttacggttcctggccttttgctggccttttgctcacatgt

SEQ ID NO: 116 - DNA, 4477 bp, Artificial Sequence
  AAVC-Syn-eGFP
cctgcaggcagctgcgcgctcgctcgctcactgaggccgcccgggcaaagcccgggcgtcgggcgacctttggtcgcccggcctcagtgagcgagcgagcgcgcagagagggagtggccaactccatcactaggggttcctgcggcctaaggcaattgactacaaaccgagtatctgcagagggccctgcgtatgagtgcaagtgggttttaggaccaggatgaggcggggtgggggtgcctacctgacgaccgaccccgacccactggacaagcacccaacccccattccccaaattgcgcatcccctatcagagagggggaggggaaacaggatgcggcgaggcgcgtgcgcactgccagcttcagcaccgcggacagtgccttcgcccccgcctggcggcgcgcgccaccgccgcctcagcactgaaggcgcgctgacgtcactcgccggtcccccgcaaactccccttcccggccaccttggtcgcgtccgcgccgccgccggcccagccggaccgcaccacgcgaggcgcgagataggggggcacgggcgcgaccatctgcgctgcggcgccggcgactcagcgctgcctcagtctgcggtgggcagcggaggagtcgtgtcgtgcctgagagcgcagctgtgctcctgggcaccgcgcagtccgcccccgcggctcctggccagaccacccctaggaccccctgccccaagtcgcagccttcgagctagccaaagcttgccgccaccatggtgtcaaagggggaggaactgtttactggagtcgtgcctattctggtcgaactggatggggatgtcaacggtcataagtttagcgtgtccggagagggagagggcgacgctacctacggaaagctgacactgaagttcatctgcaccacaggcaagctgcccgtgccttggccaaccctggtgaccacactgacatacggcgtgcagtgttttagccggtacccagaccacatgaagcagcacgatttctttaagtccgccatgcccgagggatacgtgcaggagaggaccatcttctttaaggacgatggcaactacaagaccagagctgaggtgaagttcgagggagacacactggtgaaccggatcgagctgaagggcatcgactttaaggaggatggaaacatcctgggccacaagctggagtacaactacaactctcacaacgtgtacatcatggccgataagcagaagaacggaatcaaggtgaacttcaagatccgccacaacatcgaggacggcagcgtgcagctggctgatcactaccagcagaacacccctatcggagacggacccgtgctgctgcctgataaccactacctgagcacacagtccgctctgtctaaggacccaaacgagaagagggatcacatggtcctcctggaatttgtcactgctgctgggattactctggggatggatgaactctataagtgataagcggccgcaactcgagactctagacgactgtgccttctagttgccagccatctgttgtttgcccctcccccgtgccttccttgaccctggaaggtgccactcccactgtcctttcctaataaaatgaggaaattgcatcgcattgtctgagtaggtgtcattctattctggggggtggggtggggcaggacagcaagggggaggattgggaagacaatagcaggcatgctggggatgcggtgggctctatggccgcgggccgcaggaacccctagtgatggagttggccactccctctctgcgcgctcgctcgctcactgaggccgggcgaccaaaggtcgcccgacgcccgggctttgcccgggcggcctcagtgagcgagcgagcgcgcagctgcctgcaggggcgcctgatgcggtattttctccttacgcatctgtgcggtatttcacaccgcatacgtcaaagcaaccatagtacgcgccctgtagcggcgcattaagcgcggcgggtgtggtggttacgcgcagcgtgaccgctacacttgccagcgccctagcgcccgctcctttcgctttcttcccttcctttctcgccacgttcgccggctttccccgtcaagctctaaatcgggggctccctttagggttccgatttagtgctttacggcacctcgaccccaaaaaacttgatttgggtgatggttcacgtagtgggccatcgccctgatagacggtttttcgccctttgacgttggagtccacgttctttaatagtggactcttgttccaaactggaacaacactcaaccctatctcgggctattcttttgatttataagggattttgccgatttcggcctattggttaaaaaatgagctgatttaacaaaaatttaacgcgaattttaacaaaatattaacgtttacaattttatggtgcactctcagtacaatctgctctgatgccgcatagttaagccagccccgacacccgccaacacccgctgacgcgccctgacgggcttgtctgctcccggcatccgcttacagacaagctgtgaccgtctccgggagctgcatgtgtcagaggttttcaccgtcatcaccgaaacgcgcgagacgaaagggcctcgtgatacgcctatttttataggttaatgtcatgataataatggtttcttagacgtcaggtggcacttttcggggaaatgtgcgcggaacccctatttgtttatttttctaaatacattcaaatatgtatccgctcatgagacaataaccctgataaatgcttcaataatattgaaaaaggaagagtatgagtattcaacatttccgtgtcgcccttattcccttttttgcggcattttgccttcctgtttttgctcacccagaaacgctggtgaaagtaaaagatgctgaagatcagttgggtgcacgagtgggttacatcgaactggatctcaacagcggtaagatccttgagagttttcgccccgaagaacgttttccaatgatgagcacttttaaagttctgctatgtggcgcggtattatcccgtattgacgccgggcaagagcaactcggtcgccgcatacactattctcagaatgacttggttgagtactcaccagtcacagaaaagcatcttacggatggcatgacagtaagagaattatgcagtgctgccataaccatgagtgataacactgcggccaacttacttctgacaacgatcggaggaccgaaggagctaaccgcttttttgcacaacatgggggatcatgtaactcgccttgatcgttgggaaccggagctgaatgaagccataccaaacgacgagcgtgacaccacgatgcctgtagcaatggcaacaacgttgcgcaaactattaactggcgaactacttactctagcttcccggcaacaattaatagactggatggaggcggataaagttgcaggaccacttctgcgctcggcccttccggctggctggtttattgctgataaatctggagccggtgagcgtgggtctcgcggtatcattgcagcactggggccagatggtaagccctcccgtatcgtagttatctacacgacggggagtcaggcaactatggatgaacgaaatagacagatcgctgagataggtgcctcactgattaagcattggtaactgtcagaccaagtttactcatatatactttagattgatttaaaacttcatttttaatttaaaaggatctaggtgaagatcctttttgataatctcatgaccaaaatcccttaacgtgagttttcgttccactgagcgtcagaccccgtagaaaagatcaaaggatcttcttgagatcctttttttctgcgcgtaatctgctgcttgcaaacaaaaaaaccaccgctaccagcggtggtttgtttgccggatcaagagctaccaactctttttccgaaggtaactggcttcagcagagcgcagataccaaatactgtccttctagtgtagccgtagttaggccaccacttcaagaactctgtagcaccgcctacatacctcgctctgctaatcctgttaccagtggctgctgccagtggcgataagtcgtgtcttaccgggttggactcaagacgatagttaccggataaggcgcagcggtcgggctgaacggggggttcgtgcacacagcccagcttggagcgaacgacctacaccgaactgagatacctacagcgtgagctatgagaaagcgccacgcttcccgaagggagaaaggcggacaggtatccggtaagcggcagggtcggaacaggagagcgcacgagggagcttccagggggaaacgcctggtatctttatagtcctgtcgggtttcgccacctctgacttgagcgtcgatttttgtgatgctcgtcaggggggcggagcctatggaaaaacgccagcaacgcggcctttttacggttcctggccttttgctggccttttgctcacatgt

SEQ ID NO: 117 - DNA, 4537 bp, Artificial Sequence
  AAVC-Syn-NLS-eGFP
cctgcaggcagctgcgcgctcgctcgctcactgaggccgcccgggcaaagcccgggcgtcgggcgacctttggtcgcccggcctcagtgagcgagcgagcgcgcagagagggagtggccaactccatcactaggggttcctgcggcctaaggcaattgactacaaaccgagtatctgcagagggccctgcgtatgagtgcaagtgggttttaggaccaggatgaggcggggtgggggtgcctacctgacgaccgaccccgacccactggacaagcacccaacccccattccccaaattgcgcatcccctatcagagagggggaggggaaacaggatgcggcgaggcgcgtgcgcactgccagcttcagcaccgcggacagtgccttcgcccccgcctggcggcgcgcgccaccgccgcctcagcactgaaggcgcgctgacgtcactcgccggtcccccgcaaactccccttcccggccaccttggtcgcgtccgcgccgccgccggcccagccggaccgcaccacgcgaggcgcgagataggggggcacgggcgcgaccatctgcgctgcggcgccggcgactcagcgctgcctcagtctgcggtgggcagcggaggagtcgtgtcgtgcctgagagcgcagctgtgctcctgggcaccgcgcagtccgcccccgcggctcctggccagaccacccctaggaccccctgccccaagtcgcagccttcgagctagccaaagcttgccgccaccatggccccaaaaaagaaaagaaaagtgaggtatcctgcattcctgtacaaagtcgctactatggtgtcaaaaggtgaagagctgttcaccggagtggtgcccatcctggtggagctggacggagatgtgaacggccacaagttcagcgtgtccggagagggagagggcgacgccacctacggaaagctgacactgaagtttatctgcaccacaggcaagctgcccgtgccttggccaaccctggtgaccacactgacatacggcgtgcagtgtttctctcggtacccagaccacatgaagcagcacgatttctttaagagcgccatgcccgagggatacgtgcaggagaggacaatcttctttaaggacgatggcaactacaagaccagagctgaggtgaagttcgagggagacacactggtgaaccggatcgagctgaagggcatcgactttaaggaggatggaaacatcctgggccacaagctggagtacaactacaactcccacaacgtgtacatcatggccgataagcagaagaacggaatcaaggtgaactttaagatccgccacaacatcgaggacggctctgtgcagctggctgatcactaccagcagaacacccctatcggagacggacccgtgctgctgcctgataaccactacctgtctacacagagcgccctgtccaaggacccaaacgagaagagggatcacatggtgctcctggaatttgtcactgctgccggtattactctcgggatggatgaactgtataaatgataagcggccgcaactcgagactctagacgactgtgccttctagttgccagccatctgttgtttgcccctcccccgtgccttccttgaccctggaaggtgccactcccactgtcctttcctaataaaatgaggaaattgcatcgcattgtctgagtaggtgtcattctattctggggggtggggtggggcaggacagcaagggggaggattgggaagacaatagcaggcatgctggggatgcggtgggctctatggccgcgggccgcaggaacccctagtgatggagttggccactccctctctgcgcgctcgctcgctcactgaggccgggcgaccaaaggtcgcccgacgcccgggctttgcccgggcggcctcagtgagcgagcgagcgcgcagctgcctgcaggggcgcctgatgcggtattttctccttacgcatctgtgcggtatttcacaccgcatacgtcaaagcaaccatagtacgcgccctgtagcggcgcattaagcgcggcgggtgtggtggttacgcgcagcgtgaccgctacacttgccagcgccctagcgcccgctcctttcgctttcttcccttcctttctcgccacgttcgccggctttccccgtcaagctctaaatcgggggctccctttagggttccgatttagtgctttacggcacctcgaccccaaaaaacttgatttgggtgatggttcacgtagtgggccatcgccctgatagacggtttttcgccctttgacgttggagtccacgttctttaatagtggactcttgttccaaactggaacaacactcaaccctatctcgggctattcttttgatttataagggattttgccgatttcggcctattggttaaaaaatgagctgatttaacaaaaatttaacgcgaattttaacaaaatattaacgtttacaattttatggtgcactctcagtacaatctgctctgatgccgcatagttaagccagccccgacacccgccaacacccgctgacgcgccctgacgggcttgtctgctcccggcatccgcttacagacaagctgtgaccgtctccgggagctgcatgtgtcagaggttttcaccgtcatcaccgaaacgcgcgagacgaaagggcctcgtgatacgcctatttttataggttaatgtcatgataataatggtttcttagacgtcaggtggcacttttcggggaaatgtgcgcggaacccctatttgtttatttttctaaatacattcaaatatgtatccgctcatgagacaataaccctgataaatgcttcaataatattgaaaaaggaagagtatgagtattcaacatttccgtgtcgcccttattcccttttttgcggcattttgccttcctgtttttgctcacccagaaacgctggtgaaagtaaaagatgctgaagatcagttgggtgcacgagtgggttacatcgaactggatctcaacagcggtaagatccttgagagttttcgccccgaagaacgttttccaatgatgagcacttttaaagttctgctatgtggcgcggtattatcccgtattgacgccgggcaagagcaactcggtcgccgcatacactattctcagaatgacttggttgagtactcaccagtcacagaaaagcatcttacggatggcatgacagtaagagaattatgcagtgctgccataaccatgagtgataacactgcggccaacttacttctgacaacgatcggaggaccgaaggagctaaccgcttttttgcacaacatgggggatcatgtaactcgccttgatcgttgggaaccggagctgaatgaagccataccaaacgacgagcgtgacaccacgatgcctgtagcaatggcaacaacgttgcgcaaactattaactggcgaactacttactctagcttcccggcaacaattaatagactggatggaggcggataaagttgcaggaccacttctgcgctcggcccttccggctggctggtttattgctgataaatctggagccggtgagcgtgggtctcgcggtatcattgcagcactggggccagatggtaagccctcccgtatcgtagttatctacacgacggggagtcaggcaactatggatgaacgaaatagacagatcgctgagataggtgcctcactgattaagcattggtaactgtcagaccaagtttactcatatatactttagattgatttaaaacttcatttttaatttaaaaggatctaggtgaagatcctttttgataatctcatgaccaaaatcccttaacgtgagttttcgttccactgagcgtcagaccccgtagaaaagatcaaaggatcttcttgagatcctttttttctgcgcgtaatctgctgcttgcaaacaaaaaaaccaccgctaccagcggtggtttgtttgccggatcaagagctaccaactctttttccgaaggtaactggcttcagcagagcgcagataccaaatactgtccttctagtgtagccgtagttaggccaccacttcaagaactctgtagcaccgcctacatacctcgctctgctaatcctgttaccagtggctgctgccagtggcgataagtcgtgtcttaccgggttggactcaagacgatagttaccggataaggcgcagcggtcgggctgaacggggggttcgtgcacacagcccagcttggagcgaacgacctacaccgaactgagatacctacagcgtgagctatgagaaagcgccacgcttcccgaagggagaaaggcggacaggtatccggtaagcggcagggtcggaacaggagagcgcacgagggagcttccagggggaaacgcctggtatctttatagtcctgtcgggtttcgccacctctgacttgagcgtcgatttttgtgatgctcgtcaggggggcggagcctatggaaaaacgccagcaacgcggcctttttacggttcctggccttttgctggccttttgctcacatgt

SEQ ID NO: 118 - DNA, 6820 bp, Artificial Sequence
  AAVC-Syn-mBPIP-TATkappa28-hCDKL5-107
cctgcaggcagctgcgcgctcgctcgctcactgaggccgcccgggcaaagcccgggcgtcgggcgacctttggtcgcccggcctcagtgagcgagcgagcgcgcagagagggagtggccaactccatcactaggggttcctgcggcctaaggcaattgactacaaaccgagtatctgcagagggccctgcgtatgagtgcaagtgggttttaggaccaggatgaggcggggtgggggtgcctacctgacgaccgaccccgacccactggacaagcacccaacccccattccccaaattgcgcatcccctatcagagagggggaggggaaacaggatgcggcgaggcgcgtgcgcactgccagcttcagcaccgcggacagtgccttcgcccccgcctggcggcgcgcgccaccgccgcctcagcactgaaggcgcgctgacgtcactcgccggtcccccgcaaactccccttcccggccaccttggtcgcgtccgcgccgccgccggcccagccggaccgcaccacgcgaggcgcgagataggggggcacgggcgcgaccatctgcgctgcggcgccggcgactcagcgctgcctcagtctgcggtgggcagcggaggagtcgtgtcgtgcctgagagcgcagctgtgctcctgggcaccgcgcagtccgcccccgcggctcctggccagaccacccctaggaccccctgccccaagtcgcagccttcgagctagccaaagcttgccgccaccatgaaactctccctggtcgctgctatgctgctcctcctgtccctcgtcgctgctatgctcctgctgctgtctgccgctcgggctggtgatgctgctcagccagctaggagagctaggaggaccaagctggctgcttacgctagaaaggctgctagacaggctagggctggaggaggcggatccaagatccccaacatcggcaacgtgatgaacaagttcgagatcctgggagtggtgggagagggagcttacggagtggtgctgaagtgccggcacaaggagacacacgagatcgtggctatcaagaagtttaaggacagcgaggagaacgaggaggtgaaggagacaaccctgcgcgagctgaagatgctgaggacactgaagcaggagaacatcgtggagctgaaggaggccttcaggagacggggaaagctgtacctggtgtttgagtacgtggagaagaacatgctggagctgctggaggagatgccaaacggagtgccacctgagaaggtgaagtcctacatctaccagctgatcaaggctatccactggtgccacaagaacgacatcgtgcaccgcgatatcaagcctgagaacctgctgatctcccacaacgacgtgctgaagctgtgcgatttcggctttgccaggaacctgagcgagggaaacaacgccaactacacagagtacgtggctacccgctggtacaggagcccagagctgctgctgggagctccatacggaaagagcgtggacatgtggtccgtgggctgcatcctgggagagctgtctgacggccagcctctgttcccaggagagagcgagatcgatcagctgtttaccatccagaaggtgctgggccctctgccaagcgagcagatgaagctgttctactccaaccctcgcttccacggactgaggtttcccgccgtgaaccaccctcagagcctggagcgcaggtacctgggcatcctgaactccgtgctgctggatctgatgaagaacctgctgaagctggaccccgccgatagatacctgaccgagcagtgtctgaaccaccctacatttcagacccagagactgctggaccggagcccttcccgctctgctaagaggaagccataccacgtggagagctccaccctgtccaaccgcaaccaggccggcaagtctacagctctgcagagccaccacaggagcaactccaaggacatccagaacctgtctgtgggcctgcctagggctgatgagggactgccagctaacgagagcttcctgaacggcaacctggccggagcttctctgagcccactgcacacaaagacctaccaggcctctagccagcccggctccacatctaaggacctgaccaacaacaacatcccacacctgctgtctcccaaggaggctaagagcaagaccgagttcgactttaacatcgatcccaagcctagcgagggccctggaacaaagtacctgaagagcaactccagatctcagcagaaccggcactccttcatggagtcctctcagtctaaggccggcaccctgcagccaaacgagaagcagagccggcactcctacatcgataccatcccccagagctcccgcagcccttcctacaggacaaaggccaagagccacggcgctctgtctgacagcaagtccgtgtctaacctgtccgaggccagagctcagatcgctgagccaagcacctccaggtactttccttctagctgtctggacctgaactctcctacaagcccaacacccaccagacacagcgatacacggaccctgctgtctccaagcggcagaaacaaccggaacgagggaaccctggattctagacggaccacaaccaggcacagcaagacaatggaggagctgaagctgccagagcacatggactcctctcactcccactctctgagcgccccccacgagtccttctcttacggcctgggatacacctcccccttcagctcccagcagcgcccccacaggcactctatgtacgtgacaagagacaaggtgcgggccaagggcctggatggaagcctgtccatcggccagggaatggccgctagagctaactccctgcagctgctgtctcctcagccaggagagcagctgccacccgagatgaccgtggccagatctagcgtgaaggagacaagccgggagggcacctcctctttccacacaagacagaagtccgagggcggagtgtaccacgacccccactctgacgatggaacagctcctaaggagaaccggcacctgtacaacgatcccgtgcctcgcagggtgggctccttctaccgcgtgccatctcccaggcctgacaacagctttcacgagaacaacgtgtccaccagagtgagctccctgccatctgagtctagctccggaacaaaccactctaagcggcagcccgccttcgatccttggaagagcccagagaacatctctcacagcgagcagctgaaggagaaggagaagcagggcttctttcgcagcatgaagaagaagaagaagaagagccagaccgtgcctaactccgactctccagatctgctgaccctgcagaagtccatccacagcgcctccacaccctctagcagacctaaggagtggcggcctgagaagatcagcgatctgcagacacagagccagccactgaagtccctgaggaagctgctgcacctgtcctctgccagcaaccacccagctagctccgacccaaggttccagccactgacagctcagcagaccaagaactcttttagcgagatcaggatccaccctctgtcccaggcttctggcggatctagcaacatcaggcaggagccagctccaaagggcaggcccgctctgcagctgcctggacagatggacccaggatggcacgtgtcctctgtgacaaggtccgccaccgagggaccatcctactctgagcagctgggcgctaagtctggccctaacggacacccatacaaccgaacaaatagaagtaggatgccaaacctcaatgacctcaaggaaactgccctgtgataagcggccgcaactcgagactctagacgactgtgccttctagttgccagccatctgttgtttgcccctcccccgtgccttccttgaccctggaaggtgccactcccactgtcctttcctaataaaatgaggaaattgcatcgcattgtctgagtaggtgtcattctattctggggggtggggtggggcaggacagcaagggggaggattgggaagacaatagcaggcatgctggggatgcggtgggctctatggccgcgggccgcaggaacccctagtgatggagttggccactccctctctgcgcgctcgctcgctcactgaggccgggcgaccaaaggtcgcccgacgcccgggctttgcccgggcggcctcagtgagcgagcgagcgcgcagctgcctgcaggggcgcctgatgcggtattttctccttacgcatctgtgcggtatttcacaccgcatacgtcaaagcaaccatagtacgcgccctgtagcggcgcattaagcgcggcgggtgtggtggttacgcgcagcgtgaccgctacacttgccagcgccctagcgcccgctcctttcgctttcttcccttcctttctcgccacgttcgccggctttccccgtcaagctctaaatcgggggctccctttagggttccgatttagtgctttacggcacctcgaccccaaaaaacttgatttgggtgatggttcacgtagtgggccatcgccctgatagacggtttttcgccctttgacgttggagtccacgttctttaatagtggactcttgttccaaactggaacaacactcaaccctatctcgggctattcttttgatttataagggattttgccgatttcggcctattggttaaaaaatgagctgatttaacaaaaatttaacgcgaattttaacaaaatattaacgtttacaattttatggtgcactctcagtacaatctgctctgatgccgcatagttaagccagccccgacacccgccaacacccgctgacgcgccctgacgggcttgtctgctcccggcatccgcttacagacaagctgtgaccgtctccgggagctgcatgtgtcagaggttttcaccgtcatcaccgaaacgcgcgagacgaaagggcctcgtgatacgcctatttttataggttaatgtcatgataataatggtttcttagacgtcaggtggcacttttcggggaaatgtgcgcggaacccctatttgtttatttttctaaatacattcaaatatgtatccgctcatgagacaataaccctgataaatgcttcaataatattgaaaaaggaagagtatgagtattcaacatttccgtgtcgcccttattcccttttttgcggcattttgccttcctgtttttgctcacccagaaacgctggtgaaagtaaaagatgctgaagatcagttgggtgcacgagtgggttacatcgaactggatctcaacagcggtaagatccttgagagttttcgccccgaagaacgttttccaatgatgagcacttttaaagttctgctatgtggcgcggtattatcccgtattgacgccgggcaagagcaactcggtcgccgcatacactattctcagaatgacttggttgagtactcaccagtcacagaaaagcatcttacggatggcatgacagtaagagaattatgcagtgctgccataaccatgagtgataacactgcggccaacttacttctgacaacgatcggaggaccgaaggagctaaccgcttttttgcacaacatgggggatcatgtaactcgccttgatcgttgggaaccggagctgaatgaagccataccaaacgacgagcgtgacaccacgatgcctgtagcaatggcaacaacgttgcgcaaactattaactggcgaactacttactctagcttcccggcaacaattaatagactggatggaggcggataaagttgcaggaccacttctgcgctcggcccttccggctggctggtttattgctgataaatctggagccggtgagcgtgggtctcgcggtatcattgcagcactggggccagatggtaagccctcccgtatcgtagttatctacacgacggggagtcaggcaactatggatgaacgaaatagacagatcgctgagataggtgcctcactgattaagcattggtaactgtcagaccaagtttactcatatatactttagattgatttaaaacttcatttttaatttaaaaggatctaggtgaagatcctttttgataatctcatgaccaaaatcccttaacgtgagttttcgttccactgagcgtcagaccccgtagaaaagatcaaaggatcttcttgagatcctttttttctgcgcgtaatctgctgcttgcaaacaaaaaaaccaccgctaccagcggtggtttgtttgccggatcaagagctaccaactctttttccgaaggtaactggcttcagcagagcgcagataccaaatactgtccttctagtgtagccgtagttaggccaccacttcaagaactctgtagcaccgcctacatacctcgctctgctaatcctgttaccagtggctgctgccagtggcgataagtcgtgtcttaccgggttggactcaagacgatagttaccggataaggcgcagcggtcgggctgaacggggggttcgtgcacacagcccagcttggagcgaacgacctacaccgaactgagatacctacagcgtgagctatgagaaagcgccacgcttcccgaagggagaaaggcggacaggtatccggtaagcggcagggtcggaacaggagagcgcacgagggagcttccagggggaaacgcctggtatctttatagtcctgtcgggtttcgccacctctgacttgagcgtcgatttttgtgatgctcgtcaggggggcggagcctatggaaaaacgccagcaacgcggcctttttacggttcctggccttttgctggccttttgctcacatgt

SEQ ID NO: 119 - DNA, 6820 bp, Artificial Sequence
  AAVC-Syn-mBPIP-TATkappa28-hCDKL5-107 (dead kinase)
cctgcaggcagctgcgcgctcgctcgctcactgaggccgcccgggcaaagcccgggcgtcgggcgacctttggtcgcccggcctcagtgagcgagcgagcgcgcagagagggagtggccaactccatcactaggggttcctgcggcctaaggcaattgactacaaaccgagtatctgcagagggccctgcgtatgagtgcaagtgggttttaggaccaggatgaggcggggtgggggtgcctacctgacgaccgaccccgacccactggacaagcacccaacccccattccccaaattgcgcatcccctatcagagagggggaggggaaacaggatgcggcgaggcgcgtgcgcactgccagcttcagcaccgcggacagtgccttcgcccccgcctggcggcgcgcgccaccgccgcctcagcactgaaggcgcgctgacgtcactcgccggtcccccgcaaactccccttcccggccaccttggtcgcgtccgcgccgccgccggcccagccggaccgcaccacgcgaggcgcgagataggggggcacgggcgcgaccatctgcgctgcggcgccggcgactcagcgctgcctcagtctgcggtgggcagcggaggagtcgtgtcgtgcctgagagcgcagctgtgctcctgggcaccgcgcagtccgcccccgcggctcctggccagaccacccctaggaccccctgccccaagtcgcagccttcgagctagccaaagcttgccgccaccatgaaactctccctcgtcgccgctatgctcctgctcctctccctcgtcgctgccatgctcctgctgctcagtgccgctcgggccggagatgctgctcagccagctaggagagctaggaggaccaagctggctgcttacgctaggaaggctgctaggcaggctagggctggcggaggcggatccaagatccccaacatcggcaacgtgatgaacaagttcgagatcctgggagtggtgggagagggagcttacggagtggtgctgaagtgcaggcacaaggagacacacgagatcgtggctatcaggaggttcaaggacagcgaggagaacgaggaggtgaaggagacaaccctgagagagctgaagatgctgcggacactgaagcaggagaacatcgtggagctgaaggaggccttccggcgcaggggaaagctgtacctggtgtttgagtacgtggagaagaacatgctggagctgctggaggagatgccaaacggagtgccacctgagaaggtgaagtcctacatctaccagctgatcaaggctatccactggtgccacaagaacgacatcgtgcacagagatatcaagcctgagaacctgctgatctcccacaacgacgtgctgaagctgtgcgatttcggctttgcccggaacctgagcgagggaaacaacgccaactacacagagtacgtggctaccagatggtaccggagcccagagctgctgctgggagctccatacggaaagagcgtggacatgtggtccgtgggctgcatcctgggagagctgtctgacggccagcctctgttcccaggagagagcgagatcgatcagctgtttaccatccagaaggtgctgggccctctgccaagcgagcagatgaagctgttctactccaaccctagattccacggactgcggtttcccgccgtgaaccaccctcagagcctggagagacggtacctgggcatcctgaactccgtgctgctggatctgatgaagaacctgctgaagctggaccccgccgatcgctacctgaccgagcagtgtctgaaccaccctacatttcagacccagcgcctgctggacaggagcccttccagatctgctaagcggaagccataccacgtggagagctccaccctgtccaacagaaaccaggccggcaagtctacagctctgcagagccaccaccggagcaactccaaggacatccagaacctgtctgtgggcctgcctagagccgatgagggactgccagctaacgagagcttcctgaacggcaacctggccggagcttctctgagcccactgcacacaaagacctaccaggcctctagccagcccggctccacatctaaggacctgaccaacaacaacatcccacacctgctgtctcccaaggaggctaagagcaagaccgagttcgactttaacatcgatcccaagcctagcgagggccctggaacaaagtacctgaagagcaactcccgctctcagcagaacaggcactccttcatggagtcctctcagtctaaggccggcaccctgcagccaaacgagaagcagagcagacactcctacatcgataccatcccccagagctccagaagcccttcctaccggacaaaggccaagagccacggcgctctgtctgacagcaagtccgtgtctaacctgtccgaggctagggctcagatcgctgagcccagcacctccaggtactttccttctagctgtctggacctgaactctcctacaagcccaacacccacccgccacagcgatacaaggaccctgctgtctccaagcggcaggaacaacaggaacgagggaaccctggattctcgcaggaccacaacccggcacagcaagacaatggaggagctgaagctgccagagcacatggactcctctcactcccactctctgagcgccccccacgagtccttctcttacggcctgggatacacctcccccttcagctcccagcagaggccccacaggcactctatgtacgtgacacgcgacaaggtgagggccaagggcctggatggaagcctgtccatcggccagggaatggccgctagggctaactccctgcagctgctgtctcctcagccaggagagcagctgccaccagagatgaccgtggctcgctctagcgtgaaggagacaagcagggagggcacctcctctttccacacacgccagaagtccgagggcggagtgtaccacgacccccactctgacgatggaacagctcctaaggagaacaggcacctgtacaacgatcccgtgcctagacgggtgggctccttctacagagtgccatctccccggcctgacaacagctttcacgagaacaacgtgtccacccgcgtgagctccctgccatctgagtctagctccggaacaaaccactctaagaggcagcccgccttcgatccttggaagagcccagagaacatctctcacagcgagcagctgaaggagaaggagaagcagggcttctttagaagcatgaagaagaagaagaagaagagccagaccgtgcctaactccgactctccagatctgctgaccctgcagaagtccatccacagcgcctccacaccatctagccgccctaaggagtggaggcctgagaagatcagcgatctgcagacacagagccagccactgaagtccctgcggaagctgctgcacctgtcctctgccagcaaccaccccgctagctccgacccaagattccagcccctgacagcccagcagaccaagaactcttttagcgagatccggatccaccctctgtcccaggcttctggcggatctagcaacatcagacaggagccagctccaaagggccggcccgctctgcagctgcctggccagatggacccaggatggcacgtgtcctctgtgacaaggtccgccaccgagggaccatcctactctgagcagctgggcgctaagtctggccctaacggacacccatacaataggactaatcgcagcagaatgcccaacctgaacgacctcaaggaaacagcactctgataagcggccgcaactcgagactctagacgactgtgccttctagttgccagccatctgttgtttgcccctcccccgtgccttccttgaccctggaaggtgccactcccactgtcctttcctaataaaatgaggaaattgcatcgcattgtctgagtaggtgtcattctattctggggggtggggtggggcaggacagcaagggggaggattgggaagacaatagcaggcatgctggggatgcggtgggctctatggccgcgggccgcaggaacccctagtgatggagttggccactccctctctgcgcgctcgctcgctcactgaggccgggcgaccaaaggtcgcccgacgcccgggctttgcccgggcggcctcagtgagcgagcgagcgcgcagctgcctgcaggggcgcctgatgcggtattttctccttacgcatctgtgcggtatttcacaccgcatacgtcaaagcaaccatagtacgcgccctgtagcggcgcattaagcgcggcgggtgtggtggttacgcgcagcgtgaccgctacacttgccagcgccctagcgcccgctcctttcgctttcttcccttcctttctcgccacgttcgccggctttccccgtcaagctctaaatcgggggctccctttagggttccgatttagtgctttacggcacctcgaccccaaaaaacttgatttgggtgatggttcacgtagtgggccatcgccctgatagacggtttttcgccctttgacgttggagtccacgttctttaatagtggactcttgttccaaactggaacaacactcaaccctatctcgggctattcttttgatttataagggattttgccgatttcggcctattggttaaaaaatgagctgatttaacaaaaatttaacgcgaattttaacaaaatattaacgtttacaattttatggtgcactctcagtacaatctgctctgatgccgcatagttaagccagccccgacacccgccaacacccgctgacgcgccctgacgggcttgtctgctcccggcatccgcttacagacaagctgtgaccgtctccgggagctgcatgtgtcagaggttttcaccgtcatcaccgaaacgcgcgagacgaaagggcctcgtgatacgcctatttttataggttaatgtcatgataataatggtttcttagacgtcaggtggcacttttcggggaaatgtgcgcggaacccctatttgtttatttttctaaatacattcaaatatgtatccgctcatgagacaataaccctgataaatgcttcaataatattgaaaaaggaagagtatgagtattcaacatttccgtgtcgcccttattcccttttttgcggcattttgccttcctgtttttgctcacccagaaacgctggtgaaagtaaaagatgctgaagatcagttgggtgcacgagtgggttacatcgaactggatctcaacagcggtaagatccttgagagttttcgccccgaagaacgttttccaatgatgagcacttttaaagttctgctatgtggcgcggtattatcccgtattgacgccgggcaagagcaactcggtcgccgcatacactattctcagaatgacttggttgagtactcaccagtcacagaaaagcatcttacggatggcatgacagtaagagaattatgcagtgctgccataaccatgagtgataacactgcggccaacttacttctgacaacgatcggaggaccgaaggagctaaccgcttttttgcacaacatgggggatcatgtaactcgccttgatcgttgggaaccggagctgaatgaagccataccaaacgacgagcgtgacaccacgatgcctgtagcaatggcaacaacgttgcgcaaactattaactggcgaactacttactctagcttcccggcaacaattaatagactggatggaggcggataaagttgcaggaccacttctgcgctcggcccttccggctggctggtttattgctgataaatctggagccggtgagcgtgggtctcgcggtatcattgcagcactggggccagatggtaagccctcccgtatcgtagttatctacacgacggggagtcaggcaactatggatgaacgaaatagacagatcgctgagataggtgcctcactgattaagcattggtaactgtcagaccaagtttactcatatatactttagattgatttaaaacttcatttttaatttaaaaggatctaggtgaagatcctttttgataatctcatgaccaaaatcccttaacgtgagttttcgttccactgagcgtcagaccccgtagaaaagatcaaaggatcttcttgagatcctttttttctgcgcgtaatctgctgcttgcaaacaaaaaaaccaccgctaccagcggtggtttgtttgccggatcaagagctaccaactctttttccgaaggtaactggcttcagcagagcgcagataccaaatactgtccttctagtgtagccgtagttaggccaccacttcaagaactctgtagcaccgcctacatacctcgctctgctaatcctgttaccagtggctgctgccagtggcgataagtcgtgtcttaccgggttggactcaagacgatagttaccggataaggcgcagcggtcgggctgaacggggggttcgtgcacacagcccagcttggagcgaacgacctacaccgaactgagatacctacagcgtgagctatgagaaagcgccacgcttcccgaagggagaaaggcggacaggtatccggtaagcggcagggtcggaacaggagagcgcacgagggagcttccagggggaaacgcctggtatctttatagtcctgtcgggtttcgccacctctgacttgagcgtcgatttttgtgatgctcgtcaggggggcggagcctatggaaaaacgccagcaacgcggcctttttacggttcctggccttttgctggccttttgctcacatgt

SEQ ID NO: 120 - DNA, 4660 bp, Artificial Sequence
  AAVC-Syn-mBPIP-TATkappa28-eGFP
cctgcaggcagctgcgcgctcgctcgctcactgaggccgcccgggcaaagcccgggcgtcgggcgacctttggtcgcccggcctcagtgagcgagcgagcgcgcagagagggagtggccaactccatcactaggggttcctgcggcctaaggcaattgactacaaaccgagtatctgcagagggccctgcgtatgagtgcaagtgggttttaggaccaggatgaggcggggtgggggtgcctacctgacgaccgaccccgacccactggacaagcacccaacccccattccccaaattgcgcatcccctatcagagagggggaggggaaacaggatgcggcgaggcgcgtgcgcactgccagcttcagcaccgcggacagtgccttcgcccccgcctggcggcgcgcgccaccgccgcctcagcactgaaggcgcgctgacgtcactcgccggtcccccgcaaactccccttcccggccaccttggtcgcgtccgcgccgccgccggcccagccggaccgcaccacgcgaggcgcgagataggggggcacgggcgcgaccatctgcgctgcggcgccggcgactcagcgctgcctcagtctgcggtgggcagcggaggagtcgtgtcgtgcctgagagcgcagctgtgctcctgggcaccgcgcagtccgcccccgcggctcctggccagaccacccctaggaccccctgccccaagtcgcagccttcgagctagccaaagcttgccgccaccatgaaactgtccctggtcgccgccatgctgctcctcctgtcactggtcgccgctatgctgctcctcctctccgctgctcgggctggggacgctgctcagccagctaggagagctaggaggaccaagctggctgcttacgctaggaaggctgctaggcaggctagagctggaggaggcggatctatggtgagcaagggagaggagctgttcacaggcgtggtgcccatcctggtggagctggacggagatgtgaacggccacaagtttagcgtgtccggagagggagagggcgacgctacctacggaaagctgacactgaagttcatctgcaccacaggcaagctgcccgtgccttggccaaccctggtgaccacactgacatacggcgtgcagtgtttttccaggtacccagaccacatgaagcagcacgatttctttaagtctgccatgcccgagggatacgtgcaggagcggaccatcttctttaaggacgatggcaactacaagacccgcgctgaggtgaagttcgagggagacacactggtgaacaggatcgagctgaagggcatcgactttaaggaggatggaaacatcctgggccacaagctggagtacaactacaacagccacaacgtgtacatcatggccgataagcagaagaacggaatcaaggtgaacttcaagatcagacacaacatcgaggacggctccgtgcagctggctgatcactaccagcagaacacccctatcggagacggacccgtgctgctgcctgataaccactacctgtccacacagtctgccctgagcaaggacccaaacgagaagcgggatcacatggtgctgctggaatttgtgactgctgctggtattacactgggtatggatgaactctataaatgataagcggccgcaactcgagactctagacgactgtgccttctagttgccagccatctgttgtttgcccctcccccgtgccttccttgaccctggaaggtgccactcccactgtcctttcctaataaaatgaggaaattgcatcgcattgtctgagtaggtgtcattctattctggggggtggggtggggcaggacagcaagggggaggattgggaagacaatagcaggcatgctggggatgcggtgggctctatggccgcgggccgcaggaacccctagtgatggagttggccactccctctctgcgcgctcgctcgctcactgaggccgggcgaccaaaggtcgcccgacgcccgggctttgcccgggcggcctcagtgagcgagcgagcgcgcagctgcctgcaggggcgcctgatgcggtattttctccttacgcatctgtgcggtatttcacaccgcatacgtcaaagcaaccatagtacgcgccctgtagcggcgcattaagcgcggcgggtgtggtggttacgcgcagcgtgaccgctacacttgccagcgccctagcgcccgctcctttcgctttcttcccttcctttctcgccacgttcgccggctttccccgtcaagctctaaatcgggggctccctttagggttccgatttagtgctttacggcacctcgaccccaaaaaacttgatttgggtgatggttcacgtagtgggccatcgccctgatagacggtttttcgccctttgacgttggagtccacgttctttaatagtggactcttgttccaaactggaacaacactcaaccctatctcgggctattcttttgatttataagggattttgccgatttcggcctattggttaaaaaatgagctgatttaacaaaaatttaacgcgaattttaacaaaatattaacgtttacaattttatggtgcactctcagtacaatctgctctgatgccgcatagttaagccagccccgacacccgccaacacccgctgacgcgccctgacgggcttgtctgctcccggcatccgcttacagacaagctgtgaccgtctccgggagctgcatgtgtcagaggttttcaccgtcatcaccgaaacgcgcgagacgaaagggcctcgtgatacgcctatttttataggttaatgtcatgataataatggtttcttagacgtcaggtggcacttttcggggaaatgtgcgcggaacccctatttgtttatttttctaaatacattcaaatatgtatccgctcatgagacaataaccctgataaatgcttcaataatattgaaaaaggaagagtatgagtattcaacatttccgtgtcgcccttattcccttttttgcggcattttgccttcctgtttttgctcacccagaaacgctggtgaaagtaaaagatgctgaagatcagttgggtgcacgagtgggttacatcgaactggatctcaacagcggtaagatccttgagagttttcgccccgaagaacgttttccaatgatgagcacttttaaagttctgctatgtggcgcggtattatcccgtattgacgccgggcaagagcaactcggtcgccgcatacactattctcagaatgacttggttgagtactcaccagtcacagaaaagcatcttacggatggcatgacagtaagagaattatgcagtgctgccataaccatgagtgataacactgcggccaacttacttctgacaacgatcggaggaccgaaggagctaaccgcttttttgcacaacatgggggatcatgtaactcgccttgatcgttgggaaccggagctgaatgaagccataccaaacgacgagcgtgacaccacgatgcctgtagcaatggcaacaacgttgcgcaaactattaactggcgaactacttactctagcttcccggcaacaattaatagactggatggaggcggataaagttgcaggaccacttctgcgctcggcccttccggctggctggtttattgctgataaatctggagccggtgagcgtgggtctcgcggtatcattgcagcactggggccagatggtaagccctcccgtatcgtagttatctacacgacggggagtcaggcaactatggatgaacgaaatagacagatcgctgagataggtgcctcactgattaagcattggtaactgtcagaccaagtttactcatatatactttagattgatttaaaacttcatttttaatttaaaaggatctaggtgaagatcctttttgataatctcatgaccaaaatcccttaacgtgagttttcgttccactgagcgtcagaccccgtagaaaagatcaaaggatcttcttgagatcctttttttctgcgcgtaatctgctgcttgcaaacaaaaaaaccaccgctaccagcggtggtttgtttgccggatcaagagctaccaactctttttccgaaggtaactggcttcagcagagcgcagataccaaatactgtccttctagtgtagccgtagttaggccaccacttcaagaactctgtagcaccgcctacatacctcgctctgctaatcctgttaccagtggctgctgccagtggcgataagtcgtgtcttaccgggttggactcaagacgatagttaccggataaggcgcagcggtcgggctgaacggggggttcgtgcacacagcccagcttggagcgaacgacctacaccgaactgagatacctacagcgtgagctatgagaaagcgccacgcttcccgaagggagaaaggcggacaggtatccggtaagcggcagggtcggaacaggagagcgcacgagggagcttccagggggaaacgcctggtatctttatagtcctgtcgggtttcgccacctctgacttgagcgtcgatttttgtgatgctcgtcaggggggcggagcctatggaaaaacgccagcaacgcggcctttttacggttcctggccttttgctggccttttgctcacatgt

SEQ ID NO: 121 - DNA, 4720 bp, Artificial Sequence
  AAVC-Syn- mBPIP-TATkappa28-NLS-eGFP
cctgcaggcagctgcgcgctcgctcgctcactgaggccgcccgggcaaagcccgggcgtcgggcgacctttggtcgcccggcctcagtgagcgagcgagcgcgcagagagggagtggccaactccatcactaggggttcctgcggcctaaggcaattgactacaaaccgagtatctgcagagggccctgcgtatgagtgcaagtgggttttaggaccaggatgaggcggggtgggggtgcctacctgacgaccgaccccgacccactggacaagcacccaacccccattccccaaattgcgcatcccctatcagagagggggaggggaaacaggatgcggcgaggcgcgtgcgcactgccagcttcagcaccgcggacagtgccttcgcccccgcctggcggcgcgcgccaccgccgcctcagcactgaaggcgcgctgacgtcactcgccggtcccccgcaaactccccttcccggccaccttggtcgcgtccgcgccgccgccggcccagccggaccgcaccacgcgaggcgcgagataggggggcacgggcgcgaccatctgcgctgcggcgccggcgactcagcgctgcctcagtctgcggtgggcagcggaggagtcgtgtcgtgcctgagagcgcagctgtgctcctgggcaccgcgcagtccgcccccgcggctcctggccagaccacccctaggaccccctgccccaagtcgcagccttcgagctagccaaagcttgccgccaccatgaaactcagtctggtcgccgctatgctcctgctcctctccctggtcgccgctatgctcctgctcctgtctgctgcccgcgctggggacgctgctcagccagctaggagagctaggaggaccaagctggctgcttacgctagaaaggctgctaggcaggctagagctggaggaggaggatccatggctcccaagaagaagaggaaggtgcgctaccccgccttcctgtacaaggtggctaccatggtgtctaagggagaggagctgtttacaggcgtggtgcccatcctggtggagctggacggagatgtgaacggccacaagttcagcgtgtccggagagggagagggcgacgccacctacggaaagctgacactgaagtttatctgcaccacaggcaagctgcccgtgccttggccaaccctggtgaccacactgacatacggcgtgcagtgtttctctcggtaccctgaccacatgaagcagcacgatttctttaagagcgccatgccagagggatacgtgcaggagaggacaatcttctttaaggacgatggcaactacaagaccagagctgaggtgaagttcgagggagacacactggtgaaccggatcgagctgaagggcatcgactttaaggaggatggaaacatcctgggccacaagctggagtacaactacaacagccacaacgtgtacatcatggccgataagcagaagaacggaatcaaggtgaactttaagatccgccacaacatcgaggacggctccgtgcagctggctgatcactaccagcagaacaccccaatcggagacggacccgtgctgctgcctgataaccactacctgtctacacagagcgccctgtccaaggaccctaacgagaagagggatcacatggtcctcctggaatttgtgactgctgctgggattactctcggtatggatgaactgtataaatgataagcggccgcaactcgagactctagacgactgtgccttctagttgccagccatctgttgtttgcccctcccccgtgccttccttgaccctggaaggtgccactcccactgtcctttcctaataaaatgaggaaattgcatcgcattgtctgagtaggtgtcattctattctggggggtggggtggggcaggacagcaagggggaggattgggaagacaatagcaggcatgctggggatgcggtgggctctatggccgcgggccgcaggaacccctagtgatggagttggccactccctctctgcgcgctcgctcgctcactgaggccgggcgaccaaaggtcgcccgacgcccgggctttgcccgggcggcctcagtgagcgagcgagcgcgcagctgcctgcaggggcgcctgatgcggtattttctccttacgcatctgtgcggtatttcacaccgcatacgtcaaagcaaccatagtacgcgccctgtagcggcgcattaagcgcggcgggtgtggtggttacgcgcagcgtgaccgctacacttgccagcgccctagcgcccgctcctttcgctttcttcccttcctttctcgccacgttcgccggctttccccgtcaagctctaaatcgggggctccctttagggttccgatttagtgctttacggcacctcgaccccaaaaaacttgatttgggtgatggttcacgtagtgggccatcgccctgatagacggtttttcgccctttgacgttggagtccacgttctttaatagtggactcttgttccaaactggaacaacactcaaccctatctcgggctattcttttgatttataagggattttgccgatttcggcctattggttaaaaaatgagctgatttaacaaaaatttaacgcgaattttaacaaaatattaacgtttacaattttatggtgcactctcagtacaatctgctctgatgccgcatagttaagccagccccgacacccgccaacacccgctgacgcgccctgacgggcttgtctgctcccggcatccgcttacagacaagctgtgaccgtctccgggagctgcatgtgtcagaggttttcaccgtcatcaccgaaacgcgcgagacgaaagggcctcgtgatacgcctatttttataggttaatgtcatgataataatggtttcttagacgtcaggtggcacttttcggggaaatgtgcgcggaacccctatttgtttatttttctaaatacattcaaatatgtatccgctcatgagacaataaccctgataaatgcttcaataatattgaaaaaggaagagtatgagtattcaacatttccgtgtcgcccttattcccttttttgcggcattttgccttcctgtttttgctcacccagaaacgctggtgaaagtaaaagatgctgaagatcagttgggtgcacgagtgggttacatcgaactggatctcaacagcggtaagatccttgagagttttcgccccgaagaacgttttccaatgatgagcacttttaaagttctgctatgtggcgcggtattatcccgtattgacgccgggcaagagcaactcggtcgccgcatacactattctcagaatgacttggttgagtactcaccagtcacagaaaagcatcttacggatggcatgacagtaagagaattatgcagtgctgccataaccatgagtgataacactgcggccaacttacttctgacaacgatcggaggaccgaaggagctaaccgcttttttgcacaacatgggggatcatgtaactcgccttgatcgttgggaaccggagctgaatgaagccataccaaacgacgagcgtgacaccacgatgcctgtagcaatggcaacaacgttgcgcaaactattaactggcgaactacttactctagcttcccggcaacaattaatagactggatggaggcggataaagttgcaggaccacttctgcgctcggcccttccggctggctggtttattgctgataaatctggagccggtgagcgtgggtctcgcggtatcattgcagcactggggccagatggtaagccctcccgtatcgtagttatctacacgacggggagtcaggcaactatggatgaacgaaatagacagatcgctgagataggtgcctcactgattaagcattggtaactgtcagaccaagtttactcatatatactttagattgatttaaaacttcatttttaatttaaaaggatctaggtgaagatcctttttgataatctcatgaccaaaatcccttaacgtgagttttcgttccactgagcgtcagaccccgtagaaaagatcaaaggatcttcttgagatcctttttttctgcgcgtaatctgctgcttgcaaacaaaaaaaccaccgctaccagcggtggtttgtttgccggatcaagagctaccaactctttttccgaaggtaactggcttcagcagagcgcagataccaaatactgtccttctagtgtagccgtagttaggccaccacttcaagaactctgtagcaccgcctacatacctcgctctgctaatcctgttaccagtggctgctgccagtggcgataagtcgtgtcttaccgggttggactcaagacgatagttaccggataaggcgcagcggtcgggctgaacggggggttcgtgcacacagcccagcttggagcgaacgacctacaccgaactgagatacctacagcgtgagctatgagaaagcgccacgcttcccgaagggagaaaggcggacaggtatccggtaagcggcagggtcggaacaggagagcgcacgagggagcttccagggggaaacgcctggtatctttatagtcctgtcgggtttcgccacctctgacttgagcgtcgatttttgtgatgctcgtcaggggggcggagcctatggaaaaacgccagcaacgcggcctttttacggttcctggccttttgctggccttttgctcacatgt

SEQ ID NO: 122 - DNA, 3063 bp, Artificial Sequence
  DNA sequence for mBPIP-TATkappa28-CDKL5-107 (human optimized)
atgaagctgtccctggtggccgctatgctgctgctgctgtctctggtcgctgccatgttattactgctgtctgccgctagggccggggacgcagcacagcccgcaagaagagcaagaagaactaaactggccgcttacgcaaggaaggcagcaagacaggcaagagcaggcggcggcggctccaagatccccaatatcggcaacgtgatgaataagttcgagatcctgggagtggtgggagagggagcctacggcgtggtgctgaagtgcagacacaaggagacacacgagatcgtggccatcaagaagtttaaggacagcgaggagaatgaggaggtgaaggagacaaccctgcgcgagctgaagatgctgcggacactgaagcaggagaacatcgtggagctgaaggaggccttccggagaaggggcaagctgtacctggtgtttgagtatgtggagaagaacatgctggagctgctggaggagatgcctaatggcgtgccccctgagaaggtgaagtcctacatctatcagctgatcaaggccatccactggtgccacaagaacgatatcgtgcaccgcgacatcaagcccgagaacctgctgatctcccacaatgacgtgctgaagctgtgcgacttcggctttgcccggaacctgagcgagggcaacaatgccaattacacagagtatgtggccacccgctggtacagaagccccgagctgctgctgggcgccccctatggcaagagcgtggatatgtggtccgtgggctgcatcctgggcgagctgtctgatggccagcctctgttcccaggcgagagcgagatcgaccagctgtttaccatccagaaggtgctgggccctctgccaagcgagcagatgaagctgttctactccaacccaaggttccacggcctgaggtttccagccgtgaatcaccctcagagcctggagcgccggtatctgggcatcctgaactccgtgctgctggacctgatgaagaacctgctgaagctggaccccgccgacagatacctgaccgagcagtgtctgaatcaccctacatttcagacccagagactgctggataggagcccttcccgctctgccaagcggaagccatatcacgtggagagcagcaccctgtccaatcgcaaccaggccggcaagtctacagccctgcagagccaccaccggagcaactccaaggatatccagaatctgtccgtgggcctgcctagggccgacgagggcctgccagcaaacgagagcttcctgaatggaaacctggcaggagcctctctgagcccactgcacacaaagacctaccaggcctctagccagcccggctccacatctaaggacctgaccaacaataacatcccacacctgctgtctcccaaggaggccaagagcaagaccgagttcgacttcaacatcgacccaaagcctagcgagggacctggcacaaagtatctgaagagcaacagccggagccagcagaataggcactccttcatggagtcctctcagtctaaggccggcaccctgcagccaaacgagaagcagagcaggcactcctacatcgacaccatcccacagagcagccggagcccctcctatcggacaaaggccaagtctcacggcgccctgtctgatagcaagtccgtgtctaatctgagcgaggccagagcccagatcgcagagcccagcacctccaggtactttccttctagctgtctggatctgaactctcctacaagcccaacacccaccagacacagcgacacaaggaccctgctgtctccaagcggcagaaataacaggaacgagggcaccctggacagccggcggaccacaaccaggcacagcaagacaatggaggagctgaagctgccagagcacatggattcctctcactcccactctctgagcgccccccacgagtccttctcttacggcctgggctatacctcccccttcagcagccagcagcgcccccaccggcactctatgtacgtgacaagagataaggtgagggcaaagggcctggacggcagcctgtccatcggacagggaatggcagcccgggccaactccctgcagctgctgtctcctcagccaggagagcagctgccaccagagatgaccgtggcacggagcagcgtgaaggagacaagcagggagggcacctcctctttccacacaagacagaagtccgagggcggcgtgtatcacgatccccactctgacgatggcacagcccctaaggagaacaggcacctgtacaatgaccccgtgcctaggagggtgggctccttctatcgcgtgccatctccccggcctgataatagctttcacgagaataacgtgagcacccgggtgagcagcctgccatctgagtctagctccggcacaaaccactctaagaggcagcccgcctttgacccttggaagagcccagagaatatctctcacagcgagcagctgaaggagaaggagaagcagggcttctttcgcagcatgaagaagaagaagaagaagagccagaccgtgcctaactccgattctccagacctgctgaccctgcagaagtccatccacagcgcctccacaccctctagcagacctaaggagtggaggcctgagaagatcagcgacctgcagacccagagccagccactgaagtccctgcggaagctgctgcacctgtcctctgccagcaaccacccagccagctccgatccaaggttccagcccctgacagcccagcagaccaagaacagcttcagcgagatcagaatccaccctctgtcccaggcctctggaggctctagcaacatcaggcaggagccagcaccaaagggccggcccgccctgcagctgcctggccagatggacccaggctggcacgtgtcctctgtgacaagatccgccaccgagggcccatcctactctgagcagctgggagcaaagagcggacctaatggacacccatataacaggaccaatagatccaggatgcccaatctgaacgatctgaaggagacagccctgtga

SEQ ID NO: 123 - DNA, 2877 bp, Artificial Sequence
  DNA sequence for CDKL5-107 (human optimized)
aagatccccaatatcggcaacgtgatgaataagttcgagatcctgggagtggtgggagagggagcctacggcgtggtgctgaagtgcagacacaaggagacacacgagatcgtggccatcaagaagtttaaggacagcgaggagaatgaggaggtgaaggagacaaccctgcgcgagctgaagatgctgcggacactgaagcaggagaacatcgtggagctgaaggaggccttccggagaaggggcaagctgtacctggtgtttgagtatgtggagaagaacatgctggagctgctggaggagatgcctaatggcgtgccccctgagaaggtgaagtcctacatctatcagctgatcaaggccatccactggtgccacaagaacgatatcgtgcaccgcgacatcaagcccgagaacctgctgatctcccacaatgacgtgctgaagctgtgcgacttcggctttgcccggaacctgagcgagggcaacaatgccaattacacagagtatgtggccacccgctggtacagaagccccgagctgctgctgggcgccccctatggcaagagcgtggatatgtggtccgtgggctgcatcctgggcgagctgtctgatggccagcctctgttcccaggcgagagcgagatcgaccagctgtttaccatccagaaggtgctgggccctctgccaagcgagcagatgaagctgttctactccaacccaaggttccacggcctgaggtttccagccgtgaatcaccctcagagcctggagcgccggtatctgggcatcctgaactccgtgctgctggacctgatgaagaacctgctgaagctggaccccgccgacagatacctgaccgagcagtgtctgaatcaccctacatttcagacccagagactgctggataggagcccttcccgctctgccaagcggaagccatatcacgtggagagcagcaccctgtccaatcgcaaccaggccggcaagtctacagccctgcagagccaccaccggagcaactccaaggatatccagaatctgtccgtgggcctgcctagggccgacgagggcctgccagcaaacgagagcttcctgaatggaaacctggcaggagcctctctgagcccactgcacacaaagacctaccaggcctctagccagcccggctccacatctaaggacctgaccaacaataacatcccacacctgctgtctcccaaggaggccaagagcaagaccgagttcgacttcaacatcgacccaaagcctagcgagggacctggcacaaagtatctgaagagcaacagccggagccagcagaataggcactccttcatggagtcctctcagtctaaggccggcaccctgcagccaaacgagaagcagagcaggcactcctacatcgacaccatcccacagagcagccggagcccctcctatcggacaaaggccaagtctcacggcgccctgtctgatagcaagtccgtgtctaatctgagcgaggccagagcccagatcgcagagcccagcacctccaggtactttccttctagctgtctggatctgaactctcctacaagcccaacacccaccagacacagcgacacaaggaccctgctgtctccaagcggcagaaataacaggaacgagggcaccctggacagccggcggaccacaaccaggcacagcaagacaatggaggagctgaagctgccagagcacatggattcctctcactcccactctctgagcgccccccacgagtccttctcttacggcctgggctatacctcccccttcagcagccagcagcgcccccaccggcactctatgtacgtgacaagagataaggtgagggcaaagggcctggacggcagcctgtccatcggacagggaatggcagcccgggccaactccctgcagctgctgtctcctcagccaggagagcagctgccaccagagatgaccgtggcacggagcagcgtgaaggagacaagcagggagggcacctcctctttccacacaagacagaagtccgagggcggcgtgtatcacgatccccactctgacgatggcacagcccctaaggagaacaggcacctgtacaatgaccccgtgcctaggagggtgggctccttctatcgcgtgccatctccccggcctgataatagctttcacgagaataacgtgagcacccgggtgagcagcctgccatctgagtctagctccggcacaaaccactctaagaggcagcccgcctttgacccttggaagagcccagagaatatctctcacagcgagcagctgaaggagaaggagaagcagggcttctttcgcagcatgaagaagaagaagaagaagagccagaccgtgcctaactccgattctccagacctgctgaccctgcagaagtccatccacagcgcctccacaccctctagcagacctaaggagtggaggcctgagaagatcagcgacctgcagacccagagccagccactgaagtccctgcggaagctgctgcacctgtcctctgccagcaaccacccagccagctccgatccaaggttccagcccctgacagcccagcagaccaagaacagcttcagcgagatcagaatccaccctctgtcccaggcctctggaggctctagcaacatcaggcaggagccagcaccaaagggccggcccgccctgcagctgcctggccagatggacccaggctggcacgtgtcctctgtgacaagatccgccaccgagggcccatcctactctgagcagctgggagcaaagagcggacctaatggacacccatataacaggaccaatagatccaggatgcccaatctgaacgatctgaaggagacagccctg

SEQ ID NO: 124 - DNA, 3195 bp, Artificial Sequence
  DNA sequence for MBIP-TATkappa28-CDKL5_107-FH [1-7NQ] (human optimized)
atgaagctgtccctggtggccgctatgctgctgctgctgtctctggtcgctgccatgttattactgctgtctgccgctagggccggggacgcagcacagcccgcaagaagagcaagaagaactaaactggccgcttacgcaaggaaggcagcaagacaggcaagagcaggcggcggcggctccaagatccccaatatcggcaacgtgatgaataagttcgagatcctgggagtggtgggagagggagcctacggcgtggtgctgaagtgcagacacaaggagacacacgagatcgtggccatcaagaagtttaaggacagcgaggagaatgaggaggtgaaggagacaaccctgcgcgagctgaagatgctgcggacactgaagcaggagaacatcgtggagctgaaggaggccttccggagaaggggcaagctgtacctggtgtttgagtatgtggagaagaacatgctggagctgctggaggagatgcctaatggcgtgccccctgagaaggtgaagtcctacatctatcagctgatcaaggccatccactggtgccacaagaacgatatcgtgcaccgcgacatcaagcccgagaacctgctgatctcccacaatgacgtgctgaagctgtgcgacttcggctttgcccggcagctgagcgagggcaacaatgcccagtacacagagtatgtggccacccgctggtacagaagccccgagctgctgctgggcgccccctatggcaagagcgtggatatgtggtccgtgggctgcatcctgggcgagctgtctgatggccagcctctgttcccaggcgagagcgagatcgaccagctgtttaccatccagaaggtgctgggccctctgccaagcgagcagatgaagctgttctactccaacccaaggttccacggcctgaggtttccagccgtgaatcaccctcagagcctggagcgccggtatctgggcatcctgaactccgtgctgctggacctgatgaagaacctgctgaagctggaccccgccgacagatacctgaccgagcagtgtctgaatcaccctacatttcagacccagagactgctggataggagcccttcccgctctgccaagcggaagccatatcacgtggagagcagcaccctgtccaatcgcaaccaggccggcaagtctacagccctgcagagccaccaccggagcaactccaaggatatccagcagctgtccgtgggcctgcctagggccgacgagggcctgccagcaaacgagagcttcctgaatggaaacctggcaggagcctctctgagcccactgcacacaaagacctaccaggcctctagccagcccggctccacatctaaggacctgaccaacaataacatcccacacctgctgtctcccaaggaggccaagagcaagaccgagttcgacttcaacatcgacccaaagcctagcgagggacctggcacaaagtatctgaagagcaacagccggagccagcagaataggcactccttcatggagtcctctcagtctaaggccggcaccctgcagccaaacgagaagcagagcaggcactcctacatcgacaccatcccacagagcagccggagcccctcctatcggacaaaggccaagtctcacggcgccctgtctgatagcaagtccgtgtctcagctgagcgaggccagagcccagatcgcagagcccagcacctccaggtactttccttctagctgtctggatctgaactctcctacaagcccaacacccaccagacacagcgacacaaggaccctgctgtctccaagcggcagaaataacaggaacgagggcaccctggacagccggcggaccacaaccaggcacagcaagacaatggaggagctgaagctgccagagcacatggattcctctcactcccactctctgagcgccccccacgagtccttctcttacggcctgggctatacctcccccttcagcagccagcagcgcccccaccggcactctatgtacgtgacaagagataaggtgagggcaaagggcctggacggcagcctgtccatcggacagggaatggcagcccgggccaactccctgcagctgctgtctcctcagccaggagagcagctgccaccagagatgaccgtggcacggagcagcgtgaaggagacaagcagggagggcacctcctctttccacacaagacagaagtccgagggcggcgtgtatcacgatccccactctgacgatggcacagcccctaaggagaacaggcacctgtacaatgaccccgtgcctaggagggtgggctccttctatcgcgtgccatctccccggcctgataatagctttcacgagaataacgtgagcacccgggtgagcagcctgccatctgagtctagctccggcacaaaccactctaagaggcagcccgcctttgacccttggaagagcccagagcagatctctcacagcgagcagctgaaggagaaggagaagcagggcttctttcgcagcatgaagaagaagaagaagaagagccagaccgtgcctaactccgattctccagacctgctgaccctgcagaagtccatccacagcgcctccacaccctctagcagacctaaggagtggaggcctgagaagatcagcgacctgcagacccagagccagccactgaagtccctgcggaagctgctgcacctgtcctctgccagcaaccacccagccagctccgatccaaggttccagcccctgacagcccagcagaccaagaacagcttcagcgagatcagaatccaccctctgtcccaggcctctggaggctctagcaacatcaggcaggagccagcaccaaagggccggcccgccctgcagctgcctggccagatggacccaggctggcacgtgtcctctgtgacaagatccgccaccgagggcccatcctactctgagcagctgggagcaaagagcggacctaatggacacccatatcagaggacccagagatccaggatgcccaatctgaacgatctgaaggagacagccctgggaggaggaggcagcgagaacctgtacttccagggcgattataaggaccacgatggcgactacaaggaccacgacattgactacaaggacgacgacgataaagacggagcaccccatcaccaccaccatcattga

SEQ ID NO: 125 - DNA, 2877 bp, Artificial Sequence
  DNA sequence for CDKL5_107 [1-7NQ] (human optimized)
aagatccccaatatcggcaacgtgatgaataagttcgagatcctgggagtggtgggagagggagcctacggcgtggtgctgaagtgcagacacaaggagacacacgagatcgtggccatcaagaagtttaaggacagcgaggagaatgaggaggtgaaggagacaaccctgcgcgagctgaagatgctgcggacactgaagcaggagaacatcgtggagctgaaggaggccttccggagaaggggcaagctgtacctggtgtttgagtatgtggagaagaacatgctggagctgctggaggagatgcctaatggcgtgccccctgagaaggtgaagtcctacatctatcagctgatcaaggccatccactggtgccacaagaacgatatcgtgcaccgcgacatcaagcccgagaacctgctgatctcccacaatgacgtgctgaagctgtgcgacttcggctttgcccggcagctgagcgagggcaacaatgcccagtacacagagtatgtggccacccgctggtacagaagccccgagctgctgctgggcgccccctatggcaagagcgtggatatgtggtccgtgggctgcatcctgggcgagctgtctgatggccagcctctgttcccaggcgagagcgagatcgaccagctgtttaccatccagaaggtgctgggccctctgccaagcgagcagatgaagctgttctactccaacccaaggttccacggcctgaggtttccagccgtgaatcaccctcagagcctggagcgccggtatctgggcatcctgaactccgtgctgctggacctgatgaagaacctgctgaagctggaccccgccgacagatacctgaccgagcagtgtctgaatcaccctacatttcagacccagagactgctggataggagcccttcccgctctgccaagcggaagccatatcacgtggagagcagcaccctgtccaatcgcaaccaggccggcaagtctacagccctgcagagccaccaccggagcaactccaaggatatccagcagctgtccgtgggcctgcctagggccgacgagggcctgccagcaaacgagagcttcctgaatggaaacctggcaggagcctctctgagcccactgcacacaaagacctaccaggcctctagccagcccggctccacatctaaggacctgaccaacaataacatcccacacctgctgtctcccaaggaggccaagagcaagaccgagttcgacttcaacatcgacccaaagcctagcgagggacctggcacaaagtatctgaagagcaacagccggagccagcagaataggcactccttcatggagtcctctcagtctaaggccggcaccctgcagccaaacgagaagcagagcaggcactcctacatcgacaccatcccacagagcagccggagcccctcctatcggacaaaggccaagtctcacggcgccctgtctgatagcaagtccgtgtctcagctgagcgaggccagagcccagatcgcagagcccagcacctccaggtactttccttctagctgtctggatctgaactctcctacaagcccaacacccaccagacacagcgacacaaggaccctgctgtctccaagcggcagaaataacaggaacgagggcaccctggacagccggcggaccacaaccaggcacagcaagacaatggaggagctgaagctgccagagcacatggattcctctcactcccactctctgagcgccccccacgagtccttctcttacggcctgggctatacctcccccttcagcagccagcagcgcccccaccggcactctatgtacgtgacaagagataaggtgagggcaaagggcctggacggcagcctgtccatcggacagggaatggcagcccgggccaactccctgcagctgctgtctcctcagccaggagagcagctgccaccagagatgaccgtggcacggagcagcgtgaaggagacaagcagggagggcacctcctctttccacacaagacagaagtccgagggcggcgtgtatcacgatccccactctgacgatggcacagcccctaaggagaacaggcacctgtacaatgaccccgtgcctaggagggtgggctccttctatcgcgtgccatctccccggcctgataatagctttcacgagaataacgtgagcacccgggtgagcagcctgccatctgagtctagctccggcacaaaccactctaagaggcagcccgcctttgacccttggaagagcccagagcagatctctcacagcgagcagctgaaggagaaggagaagcagggcttctttcgcagcatgaagaagaagaagaagaagagccagaccgtgcctaactccgattctccagacctgctgaccctgcagaagtccatccacagcgcctccacaccctctagcagacctaaggagtggaggcctgagaagatcagcgacctgcagacccagagccagccactgaagtccctgcggaagctgctgcacctgtcctctgccagcaaccacccagccagctccgatccaaggttccagcccctgacagcccagcagaccaagaacagcttcagcgagatcagaatccaccctctgtcccaggcctctggaggctctagcaacatcaggcaggagccagcaccaaagggccggcccgccctgcagctgcctggccagatggacccaggctggcacgtgtcctctgtgacaagatccgccaccgagggcccatcctactctgagcagctgggagcaaagagcggacctaatggacacccatatcagaggacccagagatccaggatgcccaatctgaacgatctgaaggagacagccctg

SEQ ID NO: 126 - DNA, 3195 bp, Artificial Sequence
  DNA sequence for MBIP-TATkappa28-CDKL5_107-FH [2-7NQ] (human optimized)
atgaagctgtccctggtggccgctatgctgctgctgctgtctctggtcgctgccatgttattactgctgtctgccgctagggccggggacgcagcacagcccgcaagaagagcaagaagaactaaactggccgcttacgcaaggaaggcagcaagacaggcaagagcaggcggcggcggctccaagatccccaatatcggcaacgtgatgaataagttcgagatcctgggagtggtgggagagggagcctacggcgtggtgctgaagtgcagacacaaggagacacacgagatcgtggccatcaagaagtttaaggacagcgaggagaatgaggaggtgaaggagacaaccctgcgcgagctgaagatgctgcggacactgaagcaggagaacatcgtggagctgaaggaggccttccggagaaggggcaagctgtacctggtgtttgagtatgtggagaagaacatgctggagctgctggaggagatgcctaatggcgtgccccctgagaaggtgaagtcctacatctatcagctgatcaaggccatccactggtgccacaagaacgatatcgtgcaccgcgacatcaagcccgagaacctgctgatctcccacaatgacgtgctgaagctgtgcgacttcggctttgcccggaacctgagcgagggcaacaatgcccagtacacagagtatgtggccacccgctggtacagaagccccgagctgctgctgggcgccccctatggcaagagcgtggatatgtggtccgtgggctgcatcctgggcgagctgtctgatggccagcctctgttcccaggcgagagcgagatcgaccagctgtttaccatccagaaggtgctgggccctctgccaagcgagcagatgaagctgttctactccaacccaaggttccacggcctgaggtttccagccgtgaatcaccctcagagcctggagcgccggtatctgggcatcctgaactccgtgctgctggacctgatgaagaacctgctgaagctggaccccgccgacagatacctgaccgagcagtgtctgaatcaccctacatttcagacccagagactgctggataggagcccttcccgctctgccaagcggaagccatatcacgtggagagcagcaccctgtccaatcgcaaccaggccggcaagtctacagccctgcagagccaccaccggagcaactccaaggatatccagcagctgtccgtgggcctgcctagggccgacgagggcctgccagcaaacgagagcttcctgaatggaaacctggcaggagcctctctgagcccactgcacacaaagacctaccaggcctctagccagcccggctccacatctaaggacctgaccaacaataacatcccacacctgctgtctcccaaggaggccaagagcaagaccgagttcgacttcaacatcgacccaaagcctagcgagggacctggcacaaagtatctgaagagcaacagccggagccagcagaataggcactccttcatggagtcctctcagtctaaggccggcaccctgcagccaaacgagaagcagagcaggcactcctacatcgacaccatcccacagagcagccggagcccctcctatcggacaaaggccaagtctcacggcgccctgtctgatagcaagtccgtgtctcagctgagcgaggccagagcccagatcgcagagcccagcacctccaggtactttccttctagctgtctggatctgaactctcctacaagcccaacacccaccagacacagcgacacaaggaccctgctgtctccaagcggcagaaataacaggaacgagggcaccctggacagccggcggaccacaaccaggcacagcaagacaatggaggagctgaagctgccagagcacatggattcctctcactcccactctctgagcgccccccacgagtccttctcttacggcctgggctatacctcccccttcagcagccagcagcgcccccaccggcactctatgtacgtgacaagagataaggtgagggcaaagggcctggacggcagcctgtccatcggacagggaatggcagcccgggccaactccctgcagctgctgtctcctcagccaggagagcagctgccaccagagatgaccgtggcacggagcagcgtgaaggagacaagcagggagggcacctcctctttccacacaagacagaagtccgagggcggcgtgtatcacgatccccactctgacgatggcacagcccctaaggagaacaggcacctgtacaatgaccccgtgcctaggagggtgggctccttctatcgcgtgccatctccccggcctgataatagctttcacgagaataacgtgagcacccgggtgagcagcctgccatctgagtctagctccggcacaaaccactctaagaggcagcccgcctttgacccttggaagagcccagagcagatctctcacagcgagcagctgaaggagaaggagaagcagggcttctttcgcagcatgaagaagaagaagaagaagagccagaccgtgcctaactccgattctccagacctgctgaccctgcagaagtccatccacagcgcctccacaccctctagcagacctaaggagtggaggcctgagaagatcagcgacctgcagacccagagccagccactgaagtccctgcggaagctgctgcacctgtcctctgccagcaaccacccagccagctccgatccaaggttccagcccctgacagcccagcagaccaagaacagcttcagcgagatcagaatccaccctctgtcccaggcctctggaggctctagcaacatcaggcaggagccagcaccaaagggccggcccgccctgcagctgcctggccagatggacccaggctggcacgtgtcctctgtgacaagatccgccaccgagggcccatcctactctgagcagctgggagcaaagagcggacctaatggacacccatatcagaggacccagagatccaggatgcccaatctgaacgatctgaaggagacagccctgggaggaggaggcagcgagaacctgtacttccagggcgattataaggaccacgatggcgactacaaggaccacgacattgactacaaggacgacgacgataaagacggagcaccccatcaccaccaccatcattga

SEQ ID NO: 127 - DNA, 2877 bp, Artificial Sequence
  DNA sequence for CDKL5_107 [2-7NQ] (human optimized)
aagatccccaatatcggcaacgtgatgaataagttcgagatcctgggagtggtgggagagggagcctacggcgtggtgctgaagtgcagacacaaggagacacacgagatcgtggccatcaagaagtttaaggacagcgaggagaatgaggaggtgaaggagacaaccctgcgcgagctgaagatgctgcggacactgaagcaggagaacatcgtggagctgaaggaggccttccggagaaggggcaagctgtacctggtgtttgagtatgtggagaagaacatgctggagctgctggaggagatgcctaatggcgtgccccctgagaaggtgaagtcctacatctatcagctgatcaaggccatccactggtgccacaagaacgatatcgtgcaccgcgacatcaagcccgagaacctgctgatctcccacaatgacgtgctgaagctgtgcgacttcggctttgcccggaacctgagcgagggcaacaatgcccagtacacagagtatgtggccacccgctggtacagaagccccgagctgctgctgggcgccccctatggcaagagcgtggatatgtggtccgtgggctgcatcctgggcgagctgtctgatggccagcctctgttcccaggcgagagcgagatcgaccagctgtttaccatccagaaggtgctgggccctctgccaagcgagcagatgaagctgttctactccaacccaaggttccacggcctgaggtttccagccgtgaatcaccctcagagcctggagcgccggtatctgggcatcctgaactccgtgctgctggacctgatgaagaacctgctgaagctggaccccgccgacagatacctgaccgagcagtgtctgaatcaccctacatttcagacccagagactgctggataggagcccttcccgctctgccaagcggaagccatatcacgtggagagcagcaccctgtccaatcgcaaccaggccggcaagtctacagccctgcagagccaccaccggagcaactccaaggatatccagcagctgtccgtgggcctgcctagggccgacgagggcctgccagcaaacgagagcttcctgaatggaaacctggcaggagcctctctgagcccactgcacacaaagacctaccaggcctctagccagcccggctccacatctaaggacctgaccaacaataacatcccacacctgctgtctcccaaggaggccaagagcaagaccgagttcgacttcaacatcgacccaaagcctagcgagggacctggcacaaagtatctgaagagcaacagccggagccagcagaataggcactccttcatggagtcctctcagtctaaggccggcaccctgcagccaaacgagaagcagagcaggcactcctacatcgacaccatcccacagagcagccggagcccctcctatcggacaaaggccaagtctcacggcgccctgtctgatagcaagtccgtgtctcagctgagcgaggccagagcccagatcgcagagcccagcacctccaggtactttccttctagctgtctggatctgaactctcctacaagcccaacacccaccagacacagcgacacaaggaccctgctgtctccaagcggcagaaataacaggaacgagggcaccctggacagccggcggaccacaaccaggcacagcaagacaatggaggagctgaagctgccagagcacatggattcctctcactcccactctctgagcgccccccacgagtccttctcttacggcctgggctatacctcccccttcagcagccagcagcgcccccaccggcactctatgtacgtgacaagagataaggtgagggcaaagggcctggacggcagcctgtccatcggacagggaatggcagcccgggccaactccctgcagctgctgtctcctcagccaggagagcagctgccaccagagatgaccgtggcacggagcagcgtgaaggagacaagcagggagggcacctcctctttccacacaagacagaagtccgagggcggcgtgtatcacgatccccactctgacgatggcacagcccctaaggagaacaggcacctgtacaatgaccccgtgcctaggagggtgggctccttctatcgcgtgccatctccccggcctgataatagctttcacgagaataacgtgagcacccgggtgagcagcctgccatctgagtctagctccggcacaaaccactctaagaggcagcccgcctttgacccttggaagagcccagagcagatctctcacagcgagcagctgaaggagaaggagaagcagggcttctttcgcagcatgaagaagaagaagaagaagagccagaccgtgcctaactccgattctccagacctgctgaccctgcagaagtccatccacagcgcctccacaccctctagcagacctaaggagtggaggcctgagaagatcagcgacctgcagacccagagccagccactgaagtccctgcggaagctgctgcacctgtcctctgccagcaaccacccagccagctccgatccaaggttccagcccctgacagcccagcagaccaagaacagcttcagcgagatcagaatccaccctctgtcccaggcctctggaggctctagcaacatcaggcaggagccagcaccaaagggccggcccgccctgcagctgcctggccagatggacccaggctggcacgtgtcctctgtgacaagatccgccaccgagggcccatcctactctgagcagctgggagcaaagagcggacctaatggacacccatatcagaggacccagagatccaggatgcccaatctgaacgatctgaaggagacagccctg

SEQ ID NO: 128 - DNA, 3195 bp, Artificial Sequence
  DNA sequence for MBIP-TATkappa28-CDKL5_107-FH [1,3-7NQ] (human optimized)
atgaagctgtccctggtggccgctatgctgctgctgctgtctctggtcgctgccatgttattactgctgtctgccgctagggccggggacgcagcacagcccgcaagaagagcaagaagaactaaactggccgcttacgcaaggaaggcagcaagacaggcaagagcaggcggcggcggctccaagatccccaatatcggcaacgtgatgaataagttcgagatcctgggagtggtgggagagggagcctacggcgtggtgctgaagtgcagacacaaggagacacacgagatcgtggccatcaagaagtttaaggacagcgaggagaatgaggaggtgaaggagacaaccctgcgcgagctgaagatgctgcggacactgaagcaggagaacatcgtggagctgaaggaggccttccggagaaggggcaagctgtacctggtgtttgagtatgtggagaagaacatgctggagctgctggaggagatgcctaatggcgtgccccctgagaaggtgaagtcctacatctatcagctgatcaaggccatccactggtgccacaagaacgatatcgtgcaccgcgacatcaagcccgagaacctgctgatctcccacaatgacgtgctgaagctgtgcgacttcggctttgcccggcagctgagcgagggcaacaatgccaattacacagagtatgtggccacccgctggtacagaagccccgagctgctgctgggcgccccctatggcaagagcgtggatatgtggtccgtgggctgcatcctgggcgagctgtctgatggccagcctctgttcccaggcgagagcgagatcgaccagctgtttaccatccagaaggtgctgggccctctgccaagcgagcagatgaagctgttctactccaacccaaggttccacggcctgaggtttccagccgtgaatcaccctcagagcctggagcgccggtatctgggcatcctgaactccgtgctgctggacctgatgaagaacctgctgaagctggaccccgccgacagatacctgaccgagcagtgtctgaatcaccctacatttcagacccagagactgctggataggagcccttcccgctctgccaagcggaagccatatcacgtggagagcagcaccctgtccaatcgcaaccaggccggcaagtctacagccctgcagagccaccaccggagcaactccaaggatatccagcagctgtccgtgggcctgcctagggccgacgagggcctgccagcaaacgagagcttcctgaatggaaacctggcaggagcctctctgagcccactgcacacaaagacctaccaggcctctagccagcccggctccacatctaaggacctgaccaacaataacatcccacacctgctgtctcccaaggaggccaagagcaagaccgagttcgacttcaacatcgacccaaagcctagcgagggacctggcacaaagtatctgaagagcaacagccggagccagcagaataggcactccttcatggagtcctctcagtctaaggccggcaccctgcagccaaacgagaagcagagcaggcactcctacatcgacaccatcccacagagcagccggagcccctcctatcggacaaaggccaagtctcacggcgccctgtctgatagcaagtccgtgtctcagctgagcgaggccagagcccagatcgcagagcccagcacctccaggtactttccttctagctgtctggatctgaactctcctacaagcccaacacccaccagacacagcgacacaaggaccctgctgtctccaagcggcagaaataacaggaacgagggcaccctggacagccggcggaccacaaccaggcacagcaagacaatggaggagctgaagctgccagagcacatggattcctctcactcccactctctgagcgccccccacgagtccttctcttacggcctgggctatacctcccccttcagcagccagcagcgcccccaccggcactctatgtacgtgacaagagataaggtgagggcaaagggcctggacggcagcctgtccatcggacagggaatggcagcccgggccaactccctgcagctgctgtctcctcagccaggagagcagctgccaccagagatgaccgtggcacggagcagcgtgaaggagacaagcagggagggcacctcctctttccacacaagacagaagtccgagggcggcgtgtatcacgatccccactctgacgatggcacagcccctaaggagaacaggcacctgtacaatgaccccgtgcctaggagggtgggctccttctatcgcgtgccatctccccggcctgataatagctttcacgagaataacgtgagcacccgggtgagcagcctgccatctgagtctagctccggcacaaaccactctaagaggcagcccgcctttgacccttggaagagcccagagcagatctctcacagcgagcagctgaaggagaaggagaagcagggcttctttcgcagcatgaagaagaagaagaagaagagccagaccgtgcctaactccgattctccagacctgctgaccctgcagaagtccatccacagcgcctccacaccctctagcagacctaaggagtggaggcctgagaagatcagcgacctgcagacccagagccagccactgaagtccctgcggaagctgctgcacctgtcctctgccagcaaccacccagccagctccgatccaaggttccagcccctgacagcccagcagaccaagaacagcttcagcgagatcagaatccaccctctgtcccaggcctctggaggctctagcaacatcaggcaggagccagcaccaaagggccggcccgccctgcagctgcctggccagatggacccaggctggcacgtgtcctctgtgacaagatccgccaccgagggcccatcctactctgagcagctgggagcaaagagcggacctaatggacacccatatcagaggacccagagatccaggatgcccaatctgaacgatctgaaggagacagccctgggaggaggaggcagcgagaacctgtacttccagggcgattataaggaccacgatggcgactacaaggaccacgacattgactacaaggacgacgacgataaagacggagcaccccatcaccaccaccatcattga

SEQ ID NO: 129 - DNA, 2877 bp, Artificial Sequence
  DNA sequence for CDKL5_107 [1,3-7NQ] (human optimized)
aagatccccaatatcggcaacgtgatgaataagttcgagatcctgggagtggtgggagagggagcctacggcgtggtgctgaagtgcagacacaaggagacacacgagatcgtggccatcaagaagtttaaggacagcgaggagaatgaggaggtgaaggagacaaccctgcgcgagctgaagatgctgcggacactgaagcaggagaacatcgtggagctgaaggaggccttccggagaaggggcaagctgtacctggtgtttgagtatgtggagaagaacatgctggagctgctggaggagatgcctaatggcgtgccccctgagaaggtgaagtcctacatctatcagctgatcaaggccatccactggtgccacaagaacgatatcgtgcaccgcgacatcaagcccgagaacctgctgatctcccacaatgacgtgctgaagctgtgcgacttcggctttgcccggcagctgagcgagggcaacaatgccaattacacagagtatgtggccacccgctggtacagaagccccgagctgctgctgggcgccccctatggcaagagcgtggatatgtggtccgtgggctgcatcctgggcgagctgtctgatggccagcctctgttcccaggcgagagcgagatcgaccagctgtttaccatccagaaggtgctgggccctctgccaagcgagcagatgaagctgttctactccaacccaaggttccacggcctgaggtttccagccgtgaatcaccctcagagcctggagcgccggtatctgggcatcctgaactccgtgctgctggacctgatgaagaacctgctgaagctggaccccgccgacagatacctgaccgagcagtgtctgaatcaccctacatttcagacccagagactgctggataggagcccttcccgctctgccaagcggaagccatatcacgtggagagcagcaccctgtccaatcgcaaccaggccggcaagtctacagccctgcagagccaccaccggagcaactccaaggatatccagcagctgtccgtgggcctgcctagggccgacgagggcctgccagcaaacgagagcttcctgaatggaaacctggcaggagcctctctgagcccactgcacacaaagacctaccaggcctctagccagcccggctccacatctaaggacctgaccaacaataacatcccacacctgctgtctcccaaggaggccaagagcaagaccgagttcgacttcaacatcgacccaaagcctagcgagggacctggcacaaagtatctgaagagcaacagccggagccagcagaataggcactccttcatggagtcctctcagtctaaggccggcaccctgcagccaaacgagaagcagagcaggcactcctacatcgacaccatcccacagagcagccggagcccctcctatcggacaaaggccaagtctcacggcgccctgtctgatagcaagtccgtgtctcagctgagcgaggccagagcccagatcgcagagcccagcacctccaggtactttccttctagctgtctggatctgaactctcctacaagcccaacacccaccagacacagcgacacaaggaccctgctgtctccaagcggcagaaataacaggaacgagggcaccctggacagccggcggaccacaaccaggcacagcaagacaatggaggagctgaagctgccagagcacatggattcctctcactcccactctctgagcgccccccacgagtccttctcttacggcctgggctatacctcccccttcagcagccagcagcgcccccaccggcactctatgtacgtgacaagagataaggtgagggcaaagggcctggacggcagcctgtccatcggacagggaatggcagcccgggccaactccctgcagctgctgtctcctcagccaggagagcagctgccaccagagatgaccgtggcacggagcagcgtgaaggagacaagcagggagggcacctcctctttccacacaagacagaagtccgagggcggcgtgtatcacgatccccactctgacgatggcacagcccctaaggagaacaggcacctgtacaatgaccccgtgcctaggagggtgggctccttctatcgcgtgccatctccccggcctgataatagctttcacgagaataacgtgagcacccgggtgagcagcctgccatctgagtctagctccggcacaaaccactctaagaggcagcccgcctttgacccttggaagagcccagagcagatctctcacagcgagcagctgaaggagaaggagaagcagggcttctttcgcagcatgaagaagaagaagaagaagagccagaccgtgcctaactccgattctccagacctgctgaccctgcagaagtccatccacagcgcctccacaccctctagcagacctaaggagtggaggcctgagaagatcagcgacctgcagacccagagccagccactgaagtccctgcggaagctgctgcacctgtcctctgccagcaaccacccagccagctccgatccaaggttccagcccctgacagcccagcagaccaagaacagcttcagcgagatcagaatccaccctctgtcccaggcctctggaggctctagcaacatcaggcaggagccagcaccaaagggccggcccgccctgcagctgcctggccagatggacccaggctggcacgtgtcctctgtgacaagatccgccaccgagggcccatcctactctgagcagctgggagcaaagagcggacctaatggacacccatatcagaggacccagagatccaggatgcccaatctgaacgatctgaaggagacagccctg

SEQ ID NO: 130 - DNA, 3195 bp, Artificial Sequence
  DNA sequence for MBIP-TATkappa28-CDKL5_107-FH [1-2,4-7NQ] (human optimized)
atgaagctgtccctggtggccgctatgctgctgctgctgtctctggtcgctgccatgttattactgctgtctgccgctagggccggggacgcagcacagcccgcaagaagagcaagaagaactaaactggccgcttacgcaaggaaggcagcaagacaggcaagagcaggcggcggcggctccaagatccccaatatcggcaacgtgatgaataagttcgagatcctgggagtggtgggagagggagcctacggcgtggtgctgaagtgcagacacaaggagacacacgagatcgtggccatcaagaagtttaaggacagcgaggagaatgaggaggtgaaggagacaaccctgcgcgagctgaagatgctgcggacactgaagcaggagaacatcgtggagctgaaggaggccttccggagaaggggcaagctgtacctggtgtttgagtatgtggagaagaacatgctggagctgctggaggagatgcctaatggcgtgccccctgagaaggtgaagtcctacatctatcagctgatcaaggccatccactggtgccacaagaacgatatcgtgcaccgcgacatcaagcccgagaacctgctgatctcccacaatgacgtgctgaagctgtgcgacttcggctttgcccggcagctgagcgagggcaacaatgcccagtacacagagtatgtggccacccgctggtacagaagccccgagctgctgctgggcgccccctatggcaagagcgtggatatgtggtccgtgggctgcatcctgggcgagctgtctgatggccagcctctgttcccaggcgagagcgagatcgaccagctgtttaccatccagaaggtgctgggccctctgccaagcgagcagatgaagctgttctactccaacccaaggttccacggcctgaggtttccagccgtgaatcaccctcagagcctggagcgccggtatctgggcatcctgaactccgtgctgctggacctgatgaagaacctgctgaagctggaccccgccgacagatacctgaccgagcagtgtctgaatcaccctacatttcagacccagagactgctggataggagcccttcccgctctgccaagcggaagccatatcacgtggagagcagcaccctgtccaatcgcaaccaggccggcaagtctacagccctgcagagccaccaccggagcaactccaaggatatccagaatctgtccgtgggcctgcctagggccgacgagggcctgccagcaaacgagagcttcctgaatggaaacctggcaggagcctctctgagcccactgcacacaaagacctaccaggcctctagccagcccggctccacatctaaggacctgaccaacaataacatcccacacctgctgtctcccaaggaggccaagagcaagaccgagttcgacttcaacatcgacccaaagcctagcgagggacctggcacaaagtatctgaagagcaacagccggagccagcagaataggcactccttcatggagtcctctcagtctaaggccggcaccctgcagccaaacgagaagcagagcaggcactcctacatcgacaccatcccacagagcagccggagcccctcctatcggacaaaggccaagtctcacggcgccctgtctgatagcaagtccgtgtctcagctgagcgaggccagagcccagatcgcagagcccagcacctccaggtactttccttctagctgtctggatctgaactctcctacaagcccaacacccaccagacacagcgacacaaggaccctgctgtctccaagcggcagaaataacaggaacgagggcaccctggacagccggcggaccacaaccaggcacagcaagacaatggaggagctgaagctgccagagcacatggattcctctcactcccactctctgagcgccccccacgagtccttctcttacggcctgggctatacctcccccttcagcagccagcagcgcccccaccggcactctatgtacgtgacaagagataaggtgagggcaaagggcctggacggcagcctgtccatcggacagggaatggcagcccgggccaactccctgcagctgctgtctcctcagccaggagagcagctgccaccagagatgaccgtggcacggagcagcgtgaaggagacaagcagggagggcacctcctctttccacacaagacagaagtccgagggcggcgtgtatcacgatccccactctgacgatggcacagcccctaaggagaacaggcacctgtacaatgaccccgtgcctaggagggtgggctccttctatcgcgtgccatctccccggcctgataatagctttcacgagaataacgtgagcacccgggtgagcagcctgccatctgagtctagctccggcacaaaccactctaagaggcagcccgcctttgacccttggaagagcccagagcagatctctcacagcgagcagctgaaggagaaggagaagcagggcttctttcgcagcatgaagaagaagaagaagaagagccagaccgtgcctaactccgattctccagacctgctgaccctgcagaagtccatccacagcgcctccacaccctctagcagacctaaggagtggaggcctgagaagatcagcgacctgcagacccagagccagccactgaagtccctgcggaagctgctgcacctgtcctctgccagcaaccacccagccagctccgatccaaggttccagcccctgacagcccagcagaccaagaacagcttcagcgagatcagaatccaccctctgtcccaggcctctggaggctctagcaacatcaggcaggagccagcaccaaagggccggcccgccctgcagctgcctggccagatggacccaggctggcacgtgtcctctgtgacaagatccgccaccgagggcccatcctactctgagcagctgggagcaaagagcggacctaatggacacccatatcagaggacccagagatccaggatgcccaatctgaacgatctgaaggagacagccctgggaggaggaggcagcgagaacctgtacttccagggcgattataaggaccacgatggcgactacaaggaccacgacattgactacaaggacgacgacgataaagacggagcaccccatcaccaccaccatcattga

SEQ ID NO: 131 - DNA, 2877 bp, Artificial Sequence
  DNA sequence for CDKL5_107 [1-2,4-7NQ] (human optimized)
aagatccccaatatcggcaacgtgatgaataagttcgagatcctgggagtggtgggagagggagcctacggcgtggtgctgaagtgcagacacaaggagacacacgagatcgtggccatcaagaagtttaaggacagcgaggagaatgaggaggtgaaggagacaaccctgcgcgagctgaagatgctgcggacactgaagcaggagaacatcgtggagctgaaggaggccttccggagaaggggcaagctgtacctggtgtttgagtatgtggagaagaacatgctggagctgctggaggagatgcctaatggcgtgccccctgagaaggtgaagtcctacatctatcagctgatcaaggccatccactggtgccacaagaacgatatcgtgcaccgcgacatcaagcccgagaacctgctgatctcccacaatgacgtgctgaagctgtgcgacttcggctttgcccggcagctgagcgagggcaacaatgcccagtacacagagtatgtggccacccgctggtacagaagccccgagctgctgctgggcgccccctatggcaagagcgtggatatgtggtccgtgggctgcatcctgggcgagctgtctgatggccagcctctgttcccaggcgagagcgagatcgaccagctgtttaccatccagaaggtgctgggccctctgccaagcgagcagatgaagctgttctactccaacccaaggttccacggcctgaggtttccagccgtgaatcaccctcagagcctggagcgccggtatctgggcatcctgaactccgtgctgctggacctgatgaagaacctgctgaagctggaccccgccgacagatacctgaccgagcagtgtctgaatcaccctacatttcagacccagagactgctggataggagcccttcccgctctgccaagcggaagccatatcacgtggagagcagcaccctgtccaatcgcaaccaggccggcaagtctacagccctgcagagccaccaccggagcaactccaaggatatccagaatctgtccgtgggcctgcctagggccgacgagggcctgccagcaaacgagagcttcctgaatggaaacctggcaggagcctctctgagcccactgcacacaaagacctaccaggcctctagccagcccggctccacatctaaggacctgaccaacaataacatcccacacctgctgtctcccaaggaggccaagagcaagaccgagttcgacttcaacatcgacccaaagcctagcgagggacctggcacaaagtatctgaagagcaacagccggagccagcagaataggcactccttcatggagtcctctcagtctaaggccggcaccctgcagccaaacgagaagcagagcaggcactcctacatcgacaccatcccacagagcagccggagcccctcctatcggacaaaggccaagtctcacggcgccctgtctgatagcaagtccgtgtctcagctgagcgaggccagagcccagatcgcagagcccagcacctccaggtactttccttctagctgtctggatctgaactctcctacaagcccaacacccaccagacacagcgacacaaggaccctgctgtctccaagcggcagaaataacaggaacgagggcaccctggacagccggcggaccacaaccaggcacagcaagacaatggaggagctgaagctgccagagcacatggattcctctcactcccactctctgagcgccccccacgagtccttctcttacggcctgggctatacctcccccttcagcagccagcagcgcccccaccggcactctatgtacgtgacaagagataaggtgagggcaaagggcctggacggcagcctgtccatcggacagggaatggcagcccgggccaactccctgcagctgctgtctcctcagccaggagagcagctgccaccagagatgaccgtggcacggagcagcgtgaaggagacaagcagggagggcacctcctctttccacacaagacagaagtccgagggcggcgtgtatcacgatccccactctgacgatggcacagcccctaaggagaacaggcacctgtacaatgaccccgtgcctaggagggtgggctccttctatcgcgtgccatctccccggcctgataatagctttcacgagaataacgtgagcacccgggtgagcagcctgccatctgagtctagctccggcacaaaccactctaagaggcagcccgcctttgacccttggaagagcccagagcagatctctcacagcgagcagctgaaggagaaggagaagcagggcttctttcgcagcatgaagaagaagaagaagaagagccagaccgtgcctaactccgattctccagacctgctgaccctgcagaagtccatccacagcgcctccacaccctctagcagacctaaggagtggaggcctgagaagatcagcgacctgcagacccagagccagccactgaagtccctgcggaagctgctgcacctgtcctctgccagcaaccacccagccagctccgatccaaggttccagcccctgacagcccagcagaccaagaacagcttcagcgagatcagaatccaccctctgtcccaggcctctggaggctctagcaacatcaggcaggagccagcaccaaagggccggcccgccctgcagctgcctggccagatggacccaggctggcacgtgtcctctgtgacaagatccgccaccgagggcccatcctactctgagcagctgggagcaaagagcggacctaatggacacccatatcagaggacccagagatccaggatgcccaatctgaacgatctgaaggagacagccctg

SEQ ID NO: 132 - DNA, 3195 bp, Artificial Sequence
  DNA sequence for MBIP-TATkappa28-CDKL5_107-FH [1-3,5-7NQ] (human optimized)
atgaagctgtccctggtggccgctatgctgctgctgctgtctctggtcgctgccatgttattactgctgtctgccgctagggccggggacgcagcacagcccgcaagaagagcaagaagaactaaactggccgcttacgcaaggaaggcagcaagacaggcaagagcaggcggcggcggctccaagatccccaatatcggcaacgtgatgaataagttcgagatcctgggagtggtgggagagggagcctacggcgtggtgctgaagtgcagacacaaggagacacacgagatcgtggccatcaagaagtttaaggacagcgaggagaatgaggaggtgaaggagacaaccctgcgcgagctgaagatgctgcggacactgaagcaggagaacatcgtggagctgaaggaggccttccggagaaggggcaagctgtacctggtgtttgagtatgtggagaagaacatgctggagctgctggaggagatgcctaatggcgtgccccctgagaaggtgaagtcctacatctatcagctgatcaaggccatccactggtgccacaagaacgatatcgtgcaccgcgacatcaagcccgagaacctgctgatctcccacaatgacgtgctgaagctgtgcgacttcggctttgcccggcagctgagcgagggcaacaatgcccagtacacagagtatgtggccacccgctggtacagaagccccgagctgctgctgggcgccccctatggcaagagcgtggatatgtggtccgtgggctgcatcctgggcgagctgtctgatggccagcctctgttcccaggcgagagcgagatcgaccagctgtttaccatccagaaggtgctgggccctctgccaagcgagcagatgaagctgttctactccaacccaaggttccacggcctgaggtttccagccgtgaatcaccctcagagcctggagcgccggtatctgggcatcctgaactccgtgctgctggacctgatgaagaacctgctgaagctggaccccgccgacagatacctgaccgagcagtgtctgaatcaccctacatttcagacccagagactgctggataggagcccttcccgctctgccaagcggaagccatatcacgtggagagcagcaccctgtccaatcgcaaccaggccggcaagtctacagccctgcagagccaccaccggagcaactccaaggatatccagcagctgtccgtgggcctgcctagggccgacgagggcctgccagcaaacgagagcttcctgaatggaaacctggcaggagcctctctgagcccactgcacacaaagacctaccaggcctctagccagcccggctccacatctaaggacctgaccaacaataacatcccacacctgctgtctcccaaggaggccaagagcaagaccgagttcgacttcaacatcgacccaaagcctagcgagggacctggcacaaagtatctgaagagcaacagccggagccagcagaataggcactccttcatggagtcctctcagtctaaggccggcaccctgcagccaaacgagaagcagagcaggcactcctacatcgacaccatcccacagagcagccggagcccctcctatcggacaaaggccaagtctcacggcgccctgtctgatagcaagtccgtgtctaatctgagcgaggccagagcccagatcgcagagcccagcacctccaggtactttccttctagctgtctggatctgaactctcctacaagcccaacacccaccagacacagcgacacaaggaccctgctgtctccaagcggcagaaataacaggaacgagggcaccctggacagccggcggaccacaaccaggcacagcaagacaatggaggagctgaagctgccagagcacatggattcctctcactcccactctctgagcgccccccacgagtccttctcttacggcctgggctatacctcccccttcagcagccagcagcgcccccaccggcactctatgtacgtgacaagagataaggtgagggcaaagggcctggacggcagcctgtccatcggacagggaatggcagcccgggccaactccctgcagctgctgtctcctcagccaggagagcagctgccaccagagatgaccgtggcacggagcagcgtgaaggagacaagcagggagggcacctcctctttccacacaagacagaagtccgagggcggcgtgtatcacgatccccactctgacgatggcacagcccctaaggagaacaggcacctgtacaatgaccccgtgcctaggagggtgggctccttctatcgcgtgccatctccccggcctgataatagctttcacgagaataacgtgagcacccgggtgagcagcctgccatctgagtctagctccggcacaaaccactctaagaggcagcccgcctttgacccttggaagagcccagagcagatctctcacagcgagcagctgaaggagaaggagaagcagggcttctttcgcagcatgaagaagaagaagaagaagagccagaccgtgcctaactccgattctccagacctgctgaccctgcagaagtccatccacagcgcctccacaccctctagcagacctaaggagtggaggcctgagaagatcagcgacctgcagacccagagccagccactgaagtccctgcggaagctgctgcacctgtcctctgccagcaaccacccagccagctccgatccaaggttccagcccctgacagcccagcagaccaagaacagcttcagcgagatcagaatccaccctctgtcccaggcctctggaggctctagcaacatcaggcaggagccagcaccaaagggccggcccgccctgcagctgcctggccagatggacccaggctggcacgtgtcctctgtgacaagatccgccaccgagggcccatcctactctgagcagctgggagcaaagagcggacctaatggacacccatatcagaggacccagagatccaggatgcccaatctgaacgatctgaaggagacagccctgggaggaggaggcagcgagaacctgtacttccagggcgattataaggaccacgatggcgactacaaggaccacgacattgactacaaggacgacgacgataaagacggagcaccccatcaccaccaccatcattga

SEQ ID NO: 133 - DNA, 2877 bp, Artificial Sequence
  DNA sequence for CDKL5_107 [1-3,5-7NQ] (human optimized)
aagatccccaatatcggcaacgtgatgaataagttcgagatcctgggagtggtgggagagggagcctacggcgtggtgctgaagtgcagacacaaggagacacacgagatcgtggccatcaagaagtttaaggacagcgaggagaatgaggaggtgaaggagacaaccctgcgcgagctgaagatgctgcggacactgaagcaggagaacatcgtggagctgaaggaggccttccggagaaggggcaagctgtacctggtgtttgagtatgtggagaagaacatgctggagctgctggaggagatgcctaatggcgtgccccctgagaaggtgaagtcctacatctatcagctgatcaaggccatccactggtgccacaagaacgatatcgtgcaccgcgacatcaagcccgagaacctgctgatctcccacaatgacgtgctgaagctgtgcgacttcggctttgcccggcagctgagcgagggcaacaatgcccagtacacagagtatgtggccacccgctggtacagaagccccgagctgctgctgggcgccccctatggcaagagcgtggatatgtggtccgtgggctgcatcctgggcgagctgtctgatggccagcctctgttcccaggcgagagcgagatcgaccagctgtttaccatccagaaggtgctgggccctctgccaagcgagcagatgaagctgttctactccaacccaaggttccacggcctgaggtttccagccgtgaatcaccctcagagcctggagcgccggtatctgggcatcctgaactccgtgctgctggacctgatgaagaacctgctgaagctggaccccgccgacagatacctgaccgagcagtgtctgaatcaccctacatttcagacccagagactgctggataggagcccttcccgctctgccaagcggaagccatatcacgtggagagcagcaccctgtccaatcgcaaccaggccggcaagtctacagccctgcagagccaccaccggagcaactccaaggatatccagcagctgtccgtgggcctgcctagggccgacgagggcctgccagcaaacgagagcttcctgaatggaaacctggcaggagcctctctgagcccactgcacacaaagacctaccaggcctctagccagcccggctccacatctaaggacctgaccaacaataacatcccacacctgctgtctcccaaggaggccaagagcaagaccgagttcgacttcaacatcgacccaaagcctagcgagggacctggcacaaagtatctgaagagcaacagccggagccagcagaataggcactccttcatggagtcctctcagtctaaggccggcaccctgcagccaaacgagaagcagagcaggcactcctacatcgacaccatcccacagagcagccggagcccctcctatcggacaaaggccaagtctcacggcgccctgtctgatagcaagtccgtgtctaatctgagcgaggccagagcccagatcgcagagcccagcacctccaggtactttccttctagctgtctggatctgaactctcctacaagcccaacacccaccagacacagcgacacaaggaccctgctgtctccaagcggcagaaataacaggaacgagggcaccctggacagccggcggaccacaaccaggcacagcaagacaatggaggagctgaagctgccagagcacatggattcctctcactcccactctctgagcgccccccacgagtccttctcttacggcctgggctatacctcccccttcagcagccagcagcgcccccaccggcactctatgtacgtgacaagagataaggtgagggcaaagggcctggacggcagcctgtccatcggacagggaatggcagcccgggccaactccctgcagctgctgtctcctcagccaggagagcagctgccaccagagatgaccgtggcacggagcagcgtgaaggagacaagcagggagggcacctcctctttccacacaagacagaagtccgagggcggcgtgtatcacgatccccactctgacgatggcacagcccctaaggagaacaggcacctgtacaatgaccccgtgcctaggagggtgggctccttctatcgcgtgccatctccccggcctgataatagctttcacgagaataacgtgagcacccgggtgagcagcctgccatctgagtctagctccggcacaaaccactctaagaggcagcccgcctttgacccttggaagagcccagagcagatctctcacagcgagcagctgaaggagaaggagaagcagggcttctttcgcagcatgaagaagaagaagaagaagagccagaccgtgcctaactccgattctccagacctgctgaccctgcagaagtccatccacagcgcctccacaccctctagcagacctaaggagtggaggcctgagaagatcagcgacctgcagacccagagccagccactgaagtccctgcggaagctgctgcacctgtcctctgccagcaaccacccagccagctccgatccaaggttccagcccctgacagcccagcagaccaagaacagcttcagcgagatcagaatccaccctctgtcccaggcctctggaggctctagcaacatcaggcaggagccagcaccaaagggccggcccgccctgcagctgcctggccagatggacccaggctggcacgtgtcctctgtgacaagatccgccaccgagggcccatcctactctgagcagctgggagcaaagagcggacctaatggacacccatatcagaggacccagagatccaggatgcccaatctgaacgatctgaaggagacagccctg

SEQ ID NO: 134 - DNA, 3195 bp, Artificial Sequence
  DNA sequence for MBIP-TATkappa28-CDKL5_107-FH [1-4,6-7NQ] (human optimized)
atgaagctgtccctggtggccgctatgctgctgctgctgtctctggtcgctgccatgttattactgctgtctgccgctagggccggggacgcagcacagcccgcaagaagagcaagaagaactaaactggccgcttacgcaaggaaggcagcaagacaggcaagagcaggcggcggcggctccaagatccccaatatcggcaacgtgatgaataagttcgagatcctgggagtggtgggagagggagcctacggcgtggtgctgaagtgcagacacaaggagacacacgagatcgtggccatcaagaagtttaaggacagcgaggagaatgaggaggtgaaggagacaaccctgcgcgagctgaagatgctgcggacactgaagcaggagaacatcgtggagctgaaggaggccttccggagaaggggcaagctgtacctggtgtttgagtatgtggagaagaacatgctggagctgctggaggagatgcctaatggcgtgccccctgagaaggtgaagtcctacatctatcagctgatcaaggccatccactggtgccacaagaacgatatcgtgcaccgcgacatcaagcccgagaacctgctgatctcccacaatgacgtgctgaagctgtgcgacttcggctttgcccggcagctgagcgagggcaacaatgcccagtacacagagtatgtggccacccgctggtacagaagccccgagctgctgctgggcgccccctatggcaagagcgtggatatgtggtccgtgggctgcatcctgggcgagctgtctgatggccagcctctgttcccaggcgagagcgagatcgaccagctgtttaccatccagaaggtgctgggccctctgccaagcgagcagatgaagctgttctactccaacccaaggttccacggcctgaggtttccagccgtgaatcaccctcagagcctggagcgccggtatctgggcatcctgaactccgtgctgctggacctgatgaagaacctgctgaagctggaccccgccgacagatacctgaccgagcagtgtctgaatcaccctacatttcagacccagagactgctggataggagcccttcccgctctgccaagcggaagccatatcacgtggagagcagcaccctgtccaatcgcaaccaggccggcaagtctacagccctgcagagccaccaccggagcaactccaaggatatccagcagctgtccgtgggcctgcctagggccgacgagggcctgccagcaaacgagagcttcctgaatggaaacctggcaggagcctctctgagcccactgcacacaaagacctaccaggcctctagccagcccggctccacatctaaggacctgaccaacaataacatcccacacctgctgtctcccaaggaggccaagagcaagaccgagttcgacttcaacatcgacccaaagcctagcgagggacctggcacaaagtatctgaagagcaacagccggagccagcagaataggcactccttcatggagtcctctcagtctaaggccggcaccctgcagccaaacgagaagcagagcaggcactcctacatcgacaccatcccacagagcagccggagcccctcctatcggacaaaggccaagtctcacggcgccctgtctgatagcaagtccgtgtctcagctgagcgaggccagagcccagatcgcagagcccagcacctccaggtactttccttctagctgtctggatctgaactctcctacaagcccaacacccaccagacacagcgacacaaggaccctgctgtctccaagcggcagaaataacaggaacgagggcaccctggacagccggcggaccacaaccaggcacagcaagacaatggaggagctgaagctgccagagcacatggattcctctcactcccactctctgagcgccccccacgagtccttctcttacggcctgggctatacctcccccttcagcagccagcagcgcccccaccggcactctatgtacgtgacaagagataaggtgagggcaaagggcctggacggcagcctgtccatcggacagggaatggcagcccgggccaactccctgcagctgctgtctcctcagccaggagagcagctgccaccagagatgaccgtggcacggagcagcgtgaaggagacaagcagggagggcacctcctctttccacacaagacagaagtccgagggcggcgtgtatcacgatccccactctgacgatggcacagcccctaaggagaacaggcacctgtacaatgaccccgtgcctaggagggtgggctccttctatcgcgtgccatctccccggcctgataatagctttcacgagaataacgtgagcacccgggtgagcagcctgccatctgagtctagctccggcacaaaccactctaagaggcagcccgcctttgacccttggaagagcccagagaatatctctcacagcgagcagctgaaggagaaggagaagcagggcttctttcgcagcatgaagaagaagaagaagaagagccagaccgtgcctaactccgattctccagacctgctgaccctgcagaagtccatccacagcgcctccacaccctctagcagacctaaggagtggaggcctgagaagatcagcgacctgcagacccagagccagccactgaagtccctgcggaagctgctgcacctgtcctctgccagcaaccacccagccagctccgatccaaggttccagcccctgacagcccagcagaccaagaacagcttcagcgagatcagaatccaccctctgtcccaggcctctggaggctctagcaacatcaggcaggagccagcaccaaagggccggcccgccctgcagctgcctggccagatggacccaggctggcacgtgtcctctgtgacaagatccgccaccgagggcccatcctactctgagcagctgggagcaaagagcggacctaatggacacccatatcagaggacccagagatccaggatgcccaatctgaacgatctgaaggagacagccctgggaggaggaggcagcgagaacctgtacttccagggcgattataaggaccacgatggcgactacaaggaccacgacattgactacaaggacgacgacgataaagacggagcaccccatcaccaccaccatcattga

SEQ ID NO: 135 - DNA, 2877 bp, Artificial Sequence
  DNA sequence for CDKL5_107 [1-4,6-7NQ] (human optimized)
aagatccccaatatcggcaacgtgatgaataagttcgagatcctgggagtggtgggagagggagcctacggcgtggtgctgaagtgcagacacaaggagacacacgagatcgtggccatcaagaagtttaaggacagcgaggagaatgaggaggtgaaggagacaaccctgcgcgagctgaagatgctgcggacactgaagcaggagaacatcgtggagctgaaggaggccttccggagaaggggcaagctgtacctggtgtttgagtatgtggagaagaacatgctggagctgctggaggagatgcctaatggcgtgccccctgagaaggtgaagtcctacatctatcagctgatcaaggccatccactggtgccacaagaacgatatcgtgcaccgcgacatcaagcccgagaacctgctgatctcccacaatgacgtgctgaagctgtgcgacttcggctttgcccggcagctgagcgagggcaacaatgcccagtacacagagtatgtggccacccgctggtacagaagccccgagctgctgctgggcgccccctatggcaagagcgtggatatgtggtccgtgggctgcatcctgggcgagctgtctgatggccagcctctgttcccaggcgagagcgagatcgaccagctgtttaccatccagaaggtgctgggccctctgccaagcgagcagatgaagctgttctactccaacccaaggttccacggcctgaggtttccagccgtgaatcaccctcagagcctggagcgccggtatctgggcatcctgaactccgtgctgctggacctgatgaagaacctgctgaagctggaccccgccgacagatacctgaccgagcagtgtctgaatcaccctacatttcagacccagagactgctggataggagcccttcccgctctgccaagcggaagccatatcacgtggagagcagcaccctgtccaatcgcaaccaggccggcaagtctacagccctgcagagccaccaccggagcaactccaaggatatccagcagctgtccgtgggcctgcctagggccgacgagggcctgccagcaaacgagagcttcctgaatggaaacctggcaggagcctctctgagcccactgcacacaaagacctaccaggcctctagccagcccggctccacatctaaggacctgaccaacaataacatcccacacctgctgtctcccaaggaggccaagagcaagaccgagttcgacttcaacatcgacccaaagcctagcgagggacctggcacaaagtatctgaagagcaacagccggagccagcagaataggcactccttcatggagtcctctcagtctaaggccggcaccctgcagccaaacgagaagcagagcaggcactcctacatcgacaccatcccacagagcagccggagcccctcctatcggacaaaggccaagtctcacggcgccctgtctgatagcaagtccgtgtctcagctgagcgaggccagagcccagatcgcagagcccagcacctccaggtactttccttctagctgtctggatctgaactctcctacaagcccaacacccaccagacacagcgacacaaggaccctgctgtctccaagcggcagaaataacaggaacgagggcaccctggacagccggcggaccacaaccaggcacagcaagacaatggaggagctgaagctgccagagcacatggattcctctcactcccactctctgagcgccccccacgagtccttctcttacggcctgggctatacctcccccttcagcagccagcagcgcccccaccggcactctatgtacgtgacaagagataaggtgagggcaaagggcctggacggcagcctgtccatcggacagggaatggcagcccgggccaactccctgcagctgctgtctcctcagccaggagagcagctgccaccagagatgaccgtggcacggagcagcgtgaaggagacaagcagggagggcacctcctctttccacacaagacagaagtccgagggcggcgtgtatcacgatccccactctgacgatggcacagcccctaaggagaacaggcacctgtacaatgaccccgtgcctaggagggtgggctccttctatcgcgtgccatctccccggcctgataatagctttcacgagaataacgtgagcacccgggtgagcagcctgccatctgagtctagctccggcacaaaccactctaagaggcagcccgcctttgacccttggaagagcccagagaatatctctcacagcgagcagctgaaggagaaggagaagcagggcttctttcgcagcatgaagaagaagaagaagaagagccagaccgtgcctaactccgattctccagacctgctgaccctgcagaagtccatccacagcgcctccacaccctctagcagacctaaggagtggaggcctgagaagatcagcgacctgcagacccagagccagccactgaagtccctgcggaagctgctgcacctgtcctctgccagcaaccacccagccagctccgatccaaggttccagcccctgacagcccagcagaccaagaacagcttcagcgagatcagaatccaccctctgtcccaggcctctggaggctctagcaacatcaggcaggagccagcaccaaagggccggcccgccctgcagctgcctggccagatggacccaggctggcacgtgtcctctgtgacaagatccgccaccgagggcccatcctactctgagcagctgggagcaaagagcggacctaatggacacccatatcagaggacccagagatccaggatgcccaatctgaacgatctgaaggagacagccctg

SEQ ID NO: 136 - DNA, 3195 bp, Artificial Sequence
  DNA sequence for MBIP-TATkappa28-CDKL5_107-FH [1-5,7NQ] (human optimized)
atgaagctgtccctggtggccgctatgctgctgctgctgtctctggtcgctgccatgttattactgctgtctgccgctagggccggggacgcagcacagcccgcaagaagagcaagaagaactaaactggccgcttacgcaaggaaggcagcaagacaggcaagagcaggcggcggcggctccaagatccccaatatcggcaacgtgatgaataagttcgagatcctgggagtggtgggagagggagcctacggcgtggtgctgaagtgcagacacaaggagacacacgagatcgtggccatcaagaagtttaaggacagcgaggagaatgaggaggtgaaggagacaaccctgcgcgagctgaagatgctgcggacactgaagcaggagaacatcgtggagctgaaggaggccttccggagaaggggcaagctgtacctggtgtttgagtatgtggagaagaacatgctggagctgctggaggagatgcctaatggcgtgccccctgagaaggtgaagtcctacatctatcagctgatcaaggccatccactggtgccacaagaacgatatcgtgcaccgcgacatcaagcccgagaacctgctgatctcccacaatgacgtgctgaagctgtgcgacttcggctttgcccggcagctgagcgagggcaacaatgcccagtacacagagtatgtggccacccgctggtacagaagccccgagctgctgctgggcgccccctatggcaagagcgtggatatgtggtccgtgggctgcatcctgggcgagctgtctgatggccagcctctgttcccaggcgagagcgagatcgaccagctgtttaccatccagaaggtgctgggccctctgccaagcgagcagatgaagctgttctactccaacccaaggttccacggcctgaggtttccagccgtgaatcaccctcagagcctggagcgccggtatctgggcatcctgaactccgtgctgctggacctgatgaagaacctgctgaagctggaccccgccgacagatacctgaccgagcagtgtctgaatcaccctacatttcagacccagagactgctggataggagcccttcccgctctgccaagcggaagccatatcacgtggagagcagcaccctgtccaatcgcaaccaggccggcaagtctacagccctgcagagccaccaccggagcaactccaaggatatccagcagctgtccgtgggcctgcctagggccgacgagggcctgccagcaaacgagagcttcctgaatggaaacctggcaggagcctctctgagcccactgcacacaaagacctaccaggcctctagccagcccggctccacatctaaggacctgaccaacaataacatcccacacctgctgtctcccaaggaggccaagagcaagaccgagttcgacttcaacatcgacccaaagcctagcgagggacctggcacaaagtatctgaagagcaacagccggagccagcagaataggcactccttcatggagtcctctcagtctaaggccggcaccctgcagccaaacgagaagcagagcaggcactcctacatcgacaccatcccacagagcagccggagcccctcctatcggacaaaggccaagtctcacggcgccctgtctgatagcaagtccgtgtctcagctgagcgaggccagagcccagatcgcagagcccagcacctccaggtactttccttctagctgtctggatctgaactctcctacaagcccaacacccaccagacacagcgacacaaggaccctgctgtctccaagcggcagaaataacaggaacgagggcaccctggacagccggcggaccacaaccaggcacagcaagacaatggaggagctgaagctgccagagcacatggattcctctcactcccactctctgagcgccccccacgagtccttctcttacggcctgggctatacctcccccttcagcagccagcagcgcccccaccggcactctatgtacgtgacaagagataaggtgagggcaaagggcctggacggcagcctgtccatcggacagggaatggcagcccgggccaactccctgcagctgctgtctcctcagccaggagagcagctgccaccagagatgaccgtggcacggagcagcgtgaaggagacaagcagggagggcacctcctctttccacacaagacagaagtccgagggcggcgtgtatcacgatccccactctgacgatggcacagcccctaaggagaacaggcacctgtacaatgaccccgtgcctaggagggtgggctccttctatcgcgtgccatctccccggcctgataatagctttcacgagaataacgtgagcacccgggtgagcagcctgccatctgagtctagctccggcacaaaccactctaagaggcagcccgcctttgacccttggaagagcccagagcagatctctcacagcgagcagctgaaggagaaggagaagcagggcttctttcgcagcatgaagaagaagaagaagaagagccagaccgtgcctaactccgattctccagacctgctgaccctgcagaagtccatccacagcgcctccacaccctctagcagacctaaggagtggaggcctgagaagatcagcgacctgcagacccagagccagccactgaagtccctgcggaagctgctgcacctgtcctctgccagcaaccacccagccagctccgatccaaggttccagcccctgacagcccagcagaccaagaacagcttcagcgagatcagaatccaccctctgtcccaggcctctggaggctctagcaacatcaggcaggagccagcaccaaagggccggcccgccctgcagctgcctggccagatggacccaggctggcacgtgtcctctgtgacaagatccgccaccgagggcccatcctactctgagcagctgggagcaaagagcggacctaatggacacccatataacaggacccagagatccaggatgcccaatctgaacgatctgaaggagacagccctgggaggaggaggcagcgagaacctgtacttccagggcgattataaggaccacgatggcgactacaaggaccacgacattgactacaaggacgacgacgataaagacggagcaccccatcaccaccaccatcattga

SEQ ID NO: 137 - DNA, 2877 bp, Artificial Sequence
  DNA sequence for CDKL5_107 [1-5,7NQ] (human optimized)
aagatccccaatatcggcaacgtgatgaataagttcgagatcctgggagtggtgggagagggagcctacggcgtggtgctgaagtgcagacacaaggagacacacgagatcgtggccatcaagaagtttaaggacagcgaggagaatgaggaggtgaaggagacaaccctgcgcgagctgaagatgctgcggacactgaagcaggagaacatcgtggagctgaaggaggccttccggagaaggggcaagctgtacctggtgtttgagtatgtggagaagaacatgctggagctgctggaggagatgcctaatggcgtgccccctgagaaggtgaagtcctacatctatcagctgatcaaggccatccactggtgccacaagaacgatatcgtgcaccgcgacatcaagcccgagaacctgctgatctcccacaatgacgtgctgaagctgtgcgacttcggctttgcccggcagctgagcgagggcaacaatgcccagtacacagagtatgtggccacccgctggtacagaagccccgagctgctgctgggcgccccctatggcaagagcgtggatatgtggtccgtgggctgcatcctgggcgagctgtctgatggccagcctctgttcccaggcgagagcgagatcgaccagctgtttaccatccagaaggtgctgggccctctgccaagcgagcagatgaagctgttctactccaacccaaggttccacggcctgaggtttccagccgtgaatcaccctcagagcctggagcgccggtatctgggcatcctgaactccgtgctgctggacctgatgaagaacctgctgaagctggaccccgccgacagatacctgaccgagcagtgtctgaatcaccctacatttcagacccagagactgctggataggagcccttcccgctctgccaagcggaagccatatcacgtggagagcagcaccctgtccaatcgcaaccaggccggcaagtctacagccctgcagagccaccaccggagcaactccaaggatatccagcagctgtccgtgggcctgcctagggccgacgagggcctgccagcaaacgagagcttcctgaatggaaacctggcaggagcctctctgagcccactgcacacaaagacctaccaggcctctagccagcccggctccacatctaaggacctgaccaacaataacatcccacacctgctgtctcccaaggaggccaagagcaagaccgagttcgacttcaacatcgacccaaagcctagcgagggacctggcacaaagtatctgaagagcaacagccggagccagcagaataggcactccttcatggagtcctctcagtctaaggccggcaccctgcagccaaacgagaagcagagcaggcactcctacatcgacaccatcccacagagcagccggagcccctcctatcggacaaaggccaagtctcacggcgccctgtctgatagcaagtccgtgtctcagctgagcgaggccagagcccagatcgcagagcccagcacctccaggtactttccttctagctgtctggatctgaactctcctacaagcccaacacccaccagacacagcgacacaaggaccctgctgtctccaagcggcagaaataacaggaacgagggcaccctggacagccggcggaccacaaccaggcacagcaagacaatggaggagctgaagctgccagagcacatggattcctctcactcccactctctgagcgccccccacgagtccttctcttacggcctgggctatacctcccccttcagcagccagcagcgcccccaccggcactctatgtacgtgacaagagataaggtgagggcaaagggcctggacggcagcctgtccatcggacagggaatggcagcccgggccaactccctgcagctgctgtctcctcagccaggagagcagctgccaccagagatgaccgtggcacggagcagcgtgaaggagacaagcagggagggcacctcctctttccacacaagacagaagtccgagggcggcgtgtatcacgatccccactctgacgatggcacagcccctaaggagaacaggcacctgtacaatgaccccgtgcctaggagggtgggctccttctatcgcgtgccatctccccggcctgataatagctttcacgagaataacgtgagcacccgggtgagcagcctgccatctgagtctagctccggcacaaaccactctaagaggcagcccgcctttgacccttggaagagcccagagcagatctctcacagcgagcagctgaaggagaaggagaagcagggcttctttcgcagcatgaagaagaagaagaagaagagccagaccgtgcctaactccgattctccagacctgctgaccctgcagaagtccatccacagcgcctccacaccctctagcagacctaaggagtggaggcctgagaagatcagcgacctgcagacccagagccagccactgaagtccctgcggaagctgctgcacctgtcctctgccagcaaccacccagccagctccgatccaaggttccagcccctgacagcccagcagaccaagaacagcttcagcgagatcagaatccaccctctgtcccaggcctctggaggctctagcaacatcaggcaggagccagcaccaaagggccggcccgccctgcagctgcctggccagatggacccaggctggcacgtgtcctctgtgacaagatccgccaccgagggcccatcctactctgagcagctgggagcaaagagcggacctaatggacacccatataacaggacccagagatccaggatgcccaatctgaacgatctgaaggagacagccctg

SEQ ID NO: 138 - DNA, 3195 bp, Artificial Sequence
  DNA sequence for MBIP-TATkappa28-CDKL5_107-FH [1-6NQ] (human optimized)
atgaagctgtccctggtggccgctatgctgctgctgctgtctctggtcgctgccatgttattactgctgtctgccgctagggccggggacgcagcacagcccgcaagaagagcaagaagaactaaactggccgcttacgcaaggaaggcagcaagacaggcaagagcaggcggcggcggctccaagatccccaatatcggcaacgtgatgaataagttcgagatcctgggagtggtgggagagggagcctacggcgtggtgctgaagtgcagacacaaggagacacacgagatcgtggccatcaagaagtttaaggacagcgaggagaatgaggaggtgaaggagacaaccctgcgcgagctgaagatgctgcggacactgaagcaggagaacatcgtggagctgaaggaggccttccggagaaggggcaagctgtacctggtgtttgagtatgtggagaagaacatgctggagctgctggaggagatgcctaatggcgtgccccctgagaaggtgaagtcctacatctatcagctgatcaaggccatccactggtgccacaagaacgatatcgtgcaccgcgacatcaagcccgagaacctgctgatctcccacaatgacgtgctgaagctgtgcgacttcggctttgcccggcagctgagcgagggcaacaatgcccagtacacagagtatgtggccacccgctggtacagaagccccgagctgctgctgggcgccccctatggcaagagcgtggatatgtggtccgtgggctgcatcctgggcgagctgtctgatggccagcctctgttcccaggcgagagcgagatcgaccagctgtttaccatccagaaggtgctgggccctctgccaagcgagcagatgaagctgttctactccaacccaaggttccacggcctgaggtttccagccgtgaatcaccctcagagcctggagcgccggtatctgggcatcctgaactccgtgctgctggacctgatgaagaacctgctgaagctggaccccgccgacagatacctgaccgagcagtgtctgaatcaccctacatttcagacccagagactgctggataggagcccttcccgctctgccaagcggaagccatatcacgtggagagcagcaccctgtccaatcgcaaccaggccggcaagtctacagccctgcagagccaccaccggagcaactccaaggatatccagcagctgtccgtgggcctgcctagggccgacgagggcctgccagcaaacgagagcttcctgaatggaaacctggcaggagcctctctgagcccactgcacacaaagacctaccaggcctctagccagcccggctccacatctaaggacctgaccaacaataacatcccacacctgctgtctcccaaggaggccaagagcaagaccgagttcgacttcaacatcgacccaaagcctagcgagggacctggcacaaagtatctgaagagcaacagccggagccagcagaataggcactccttcatggagtcctctcagtctaaggccggcaccctgcagccaaacgagaagcagagcaggcactcctacatcgacaccatcccacagagcagccggagcccctcctatcggacaaaggccaagtctcacggcgccctgtctgatagcaagtccgtgtctcagctgagcgaggccagagcccagatcgcagagcccagcacctccaggtactttccttctagctgtctggatctgaactctcctacaagcccaacacccaccagacacagcgacacaaggaccctgctgtctccaagcggcagaaataacaggaacgagggcaccctggacagccggcggaccacaaccaggcacagcaagacaatggaggagctgaagctgccagagcacatggattcctctcactcccactctctgagcgccccccacgagtccttctcttacggcctgggctatacctcccccttcagcagccagcagcgcccccaccggcactctatgtacgtgacaagagataaggtgagggcaaagggcctggacggcagcctgtccatcggacagggaatggcagcccgggccaactccctgcagctgctgtctcctcagccaggagagcagctgccaccagagatgaccgtggcacggagcagcgtgaaggagacaagcagggagggcacctcctctttccacacaagacagaagtccgagggcggcgtgtatcacgatccccactctgacgatggcacagcccctaaggagaacaggcacctgtacaatgaccccgtgcctaggagggtgggctccttctatcgcgtgccatctccccggcctgataatagctttcacgagaataacgtgagcacccgggtgagcagcctgccatctgagtctagctccggcacaaaccactctaagaggcagcccgcctttgacccttggaagagcccagagcagatctctcacagcgagcagctgaaggagaaggagaagcagggcttctttcgcagcatgaagaagaagaagaagaagagccagaccgtgcctaactccgattctccagacctgctgaccctgcagaagtccatccacagcgcctccacaccctctagcagacctaaggagtggaggcctgagaagatcagcgacctgcagacccagagccagccactgaagtccctgcggaagctgctgcacctgtcctctgccagcaaccacccagccagctccgatccaaggttccagcccctgacagcccagcagaccaagaacagcttcagcgagatcagaatccaccctctgtcccaggcctctggaggctctagcaacatcaggcaggagccagcaccaaagggccggcccgccctgcagctgcctggccagatggacccaggctggcacgtgtcctctgtgacaagatccgccaccgagggcccatcctactctgagcagctgggagcaaagagcggacctaatggacacccatatcagaggaccaatagatccaggatgcccaatctgaacgatctgaaggagacagccctgggaggaggaggcagcgagaacctgtacttccagggcgattataaggaccacgatggcgactacaaggaccacgacattgactacaaggacgacgacgataaagacggagcaccccatcaccaccaccatcattga

SEQ ID NO: 139 - DNA, 2877 bp, Artificial Sequence
  DNA sequence for CDKL5_107 [1-6NQ] (human optimized)
aagatccccaatatcggcaacgtgatgaataagttcgagatcctgggagtggtgggagagggagcctacggcgtggtgctgaagtgcagacacaaggagacacacgagatcgtggccatcaagaagtttaaggacagcgaggagaatgaggaggtgaaggagacaaccctgcgcgagctgaagatgctgcggacactgaagcaggagaacatcgtggagctgaaggaggccttccggagaaggggcaagctgtacctggtgtttgagtatgtggagaagaacatgctggagctgctggaggagatgcctaatggcgtgccccctgagaaggtgaagtcctacatctatcagctgatcaaggccatccactggtgccacaagaacgatatcgtgcaccgcgacatcaagcccgagaacctgctgatctcccacaatgacgtgctgaagctgtgcgacttcggctttgcccggcagctgagcgagggcaacaatgcccagtacacagagtatgtggccacccgctggtacagaagccccgagctgctgctgggcgccccctatggcaagagcgtggatatgtggtccgtgggctgcatcctgggcgagctgtctgatggccagcctctgttcccaggcgagagcgagatcgaccagctgtttaccatccagaaggtgctgggccctctgccaagcgagcagatgaagctgttctactccaacccaaggttccacggcctgaggtttccagccgtgaatcaccctcagagcctggagcgccggtatctgggcatcctgaactccgtgctgctggacctgatgaagaacctgctgaagctggaccccgccgacagatacctgaccgagcagtgtctgaatcaccctacatttcagacccagagactgctggataggagcccttcccgctctgccaagcggaagccatatcacgtggagagcagcaccctgtccaatcgcaaccaggccggcaagtctacagccctgcagagccaccaccggagcaactccaaggatatccagcagctgtccgtgggcctgcctagggccgacgagggcctgccagcaaacgagagcttcctgaatggaaacctggcaggagcctctctgagcccactgcacacaaagacctaccaggcctctagccagcccggctccacatctaaggacctgaccaacaataacatcccacacctgctgtctcccaaggaggccaagagcaagaccgagttcgacttcaacatcgacccaaagcctagcgagggacctggcacaaagtatctgaagagcaacagccggagccagcagaataggcactccttcatggagtcctctcagtctaaggccggcaccctgcagccaaacgagaagcagagcaggcactcctacatcgacaccatcccacagagcagccggagcccctcctatcggacaaaggccaagtctcacggcgccctgtctgatagcaagtccgtgtctcagctgagcgaggccagagcccagatcgcagagcccagcacctccaggtactttccttctagctgtctggatctgaactctcctacaagcccaacacccaccagacacagcgacacaaggaccctgctgtctccaagcggcagaaataacaggaacgagggcaccctggacagccggcggaccacaaccaggcacagcaagacaatggaggagctgaagctgccagagcacatggattcctctcactcccactctctgagcgccccccacgagtccttctcttacggcctgggctatacctcccccttcagcagccagcagcgcccccaccggcactctatgtacgtgacaagagataaggtgagggcaaagggcctggacggcagcctgtccatcggacagggaatggcagcccgggccaactccctgcagctgctgtctcctcagccaggagagcagctgccaccagagatgaccgtggcacggagcagcgtgaaggagacaagcagggagggcacctcctctttccacacaagacagaagtccgagggcggcgtgtatcacgatccccactctgacgatggcacagcccctaaggagaacaggcacctgtacaatgaccccgtgcctaggagggtgggctccttctatcgcgtgccatctccccggcctgataatagctttcacgagaataacgtgagcacccgggtgagcagcctgccatctgagtctagctccggcacaaaccactctaagaggcagcccgcctttgacccttggaagagcccagagcagatctctcacagcgagcagctgaaggagaaggagaagcagggcttctttcgcagcatgaagaagaagaagaagaagagccagaccgtgcctaactccgattctccagacctgctgaccctgcagaagtccatccacagcgcctccacaccctctagcagacctaaggagtggaggcctgagaagatcagcgacctgcagacccagagccagccactgaagtccctgcggaagctgctgcacctgtcctctgccagcaaccacccagccagctccgatccaaggttccagcccctgacagcccagcagaccaagaacagcttcagcgagatcagaatccaccctctgtcccaggcctctggaggctctagcaacatcaggcaggagccagcaccaaagggccggcccgccctgcagctgcctggccagatggacccaggctggcacgtgtcctctgtgacaagatccgccaccgagggcccatcctactctgagcagctgggagcaaagagcggacctaatggacacccatatcagaggaccaatagatccaggatgcccaatctgaacgatctgaaggagacagccctg

SEQ ID NO: 140 - DNA, 3195 bp, Artificial Sequence
  DNA sequence for MBIP-TATkappa28-CDKL5_107-FH [2NQ] (human optimized)
atgaagctgtccctggtggccgctatgctgctgctgctgtctctggtcgctgccatgttattactgctgtctgccgctagggccggggacgcagcacagcccgcaagaagagcaagaagaactaaactggccgcttacgcaaggaaggcagcaagacaggcaagagcaggcggcggcggctccaagatccccaatatcggcaacgtgatgaataagttcgagatcctgggagtggtgggagagggagcctacggcgtggtgctgaagtgcagacacaaggagacacacgagatcgtggccatcaagaagtttaaggacagcgaggagaatgaggaggtgaaggagacaaccctgcgcgagctgaagatgctgcggacactgaagcaggagaacatcgtggagctgaaggaggccttccggagaaggggcaagctgtacctggtgtttgagtatgtggagaagaacatgctggagctgctggaggagatgcctaatggcgtgccccctgagaaggtgaagtcctacatctatcagctgatcaaggccatccactggtgccacaagaacgatatcgtgcaccgcgacatcaagcccgagaacctgctgatctcccacaatgacgtgctgaagctgtgcgacttcggctttgcccggaacctgagcgagggcaacaatgcccattacacagagtatgtggccacccgctggtacagaagccccgagctgctgctgggcgccccctatggcaagagcgtggatatgtggtccgtgggctgcatcctgggcgagctgtctgatggccagcctctgttcccaggcgagagcgagatcgaccagctgtttaccatccagaaggtgctgggccctctgccaagcgagcagatgaagctgttctactccaacccaaggttccacggcctgaggtttccagccgtgaatcaccctcagagcctggagcgccggtatctgggcatcctgaactccgtgctgctggacctgatgaagaacctgctgaagctggaccccgccgacagatacctgaccgagcagtgtctgaatcaccctacatttcagacccagagactgctggataggagcccttcccgctctgccaagcggaagccatatcacgtggagagcagcaccctgtccaatcgcaaccaggccggcaagtctacagccctgcagagccaccaccggagcaactccaaggatatccagaatctgtccgtgggcctgcctagggccgacgagggcctgccagcaaacgagagcttcctgaatggaaacctggcaggagcctctctgagcccactgcacacaaagacctaccaggcctctagccagcccggctccacatctaaggacctgaccaacaataacatcccacacctgctgtctcccaaggaggccaagagcaagaccgagttcgacttcaacatcgacccaaagcctagcgagggacctggcacaaagtatctgaagagcaacagccggagccagcagaataggcactccttcatggagtcctctcagtctaaggccggcaccctgcagccaaacgagaagcagagcaggcactcctacatcgacaccatcccacagagcagccggagcccctcctatcggacaaaggccaagtctcacggcgccctgtctgatagcaagtccgtgtctaatctgagcgaggccagagcccagatcgcagagcccagcacctccaggtactttccttctagctgtctggatctgaactctcctacaagcccaacacccaccagacacagcgacacaaggaccctgctgtctccaagcggcagaaataacaggaacgagggcaccctggacagccggcggaccacaaccaggcacagcaagacaatggaggagctgaagctgccagagcacatggattcctctcactcccactctctgagcgccccccacgagtccttctcttacggcctgggctatacctcccccttcagcagccagcagcgcccccaccggcactctatgtacgtgacaagagataaggtgagggcaaagggcctggacggcagcctgtccatcggacagggaatggcagcccgggccaactccctgcagctgctgtctcctcagccaggagagcagctgccaccagagatgaccgtggcacggagcagcgtgaaggagacaagcagggagggcacctcctctttccacacaagacagaagtccgagggcggcgtgtatcacgatccccactctgacgatggcacagcccctaaggagaacaggcacctgtacaatgaccccgtgcctaggagggtgggctccttctatcgcgtgccatctccccggcctgataatagctttcacgagaataacgtgagcacccgggtgagcagcctgccatctgagtctagctccggcacaaaccactctaagaggcagcccgcctttgacccttggaagagcccagagaatatctctcacagcgagcagctgaaggagaaggagaagcagggcttctttcgcagcatgaagaagaagaagaagaagagccagaccgtgcctaactccgattctccagacctgctgaccctgcagaagtccatccacagcgcctccacaccctctagcagacctaaggagtggaggcctgagaagatcagcgacctgcagacccagagccagccactgaagtccctgcggaagctgctgcacctgtcctctgccagcaaccacccagccagctccgatccaaggttccagcccctgacagcccagcagaccaagaacagcttcagcgagatcagaatccaccctctgtcccaggcctctggaggctctagcaacatcaggcaggagccagcaccaaagggccggcccgccctgcagctgcctggccagatggacccaggctggcacgtgtcctctgtgacaagatccgccaccgagggcccatcctactctgagcagctgggagcaaagagcggacctaatggacacccatataacaggaccaatagatccaggatgcccaatctgaacgatctgaaggagacagccctgggaggaggaggcagcgagaacctgtacttccagggcgattataaggaccacgatggcgactacaaggaccacgacattgactacaaggacgacgacgataaagacggagcaccccatcaccaccaccatcattga

SEQ ID NO: 141 - DNA, 2877 bp, Artificial Sequence
  DNA sequence for CDKL5_107 [2NQ] (human optimized)
aagatccccaatatcggcaacgtgatgaataagttcgagatcctgggagtggtgggagagggagcctacggcgtggtgctgaagtgcagacacaaggagacacacgagatcgtggccatcaagaagtttaaggacagcgaggagaatgaggaggtgaaggagacaaccctgcgcgagctgaagatgctgcggacactgaagcaggagaacatcgtggagctgaaggaggccttccggagaaggggcaagctgtacctggtgtttgagtatgtggagaagaacatgctggagctgctggaggagatgcctaatggcgtgccccctgagaaggtgaagtcctacatctatcagctgatcaaggccatccactggtgccacaagaacgatatcgtgcaccgcgacatcaagcccgagaacctgctgatctcccacaatgacgtgctgaagctgtgcgacttcggctttgcccggaacctgagcgagggcaacaatgcccattacacagagtatgtggccacccgctggtacagaagccccgagctgctgctgggcgccccctatggcaagagcgtggatatgtggtccgtgggctgcatcctgggcgagctgtctgatggccagcctctgttcccaggcgagagcgagatcgaccagctgtttaccatccagaaggtgctgggccctctgccaagcgagcagatgaagctgttctactccaacccaaggttccacggcctgaggtttccagccgtgaatcaccctcagagcctggagcgccggtatctgggcatcctgaactccgtgctgctggacctgatgaagaacctgctgaagctggaccccgccgacagatacctgaccgagcagtgtctgaatcaccctacatttcagacccagagactgctggataggagcccttcccgctctgccaagcggaagccatatcacgtggagagcagcaccctgtccaatcgcaaccaggccggcaagtctacagccctgcagagccaccaccggagcaactccaaggatatccagaatctgtccgtgggcctgcctagggccgacgagggcctgccagcaaacgagagcttcctgaatggaaacctggcaggagcctctctgagcccactgcacacaaagacctaccaggcctctagccagcccggctccacatctaaggacctgaccaacaataacatcccacacctgctgtctcccaaggaggccaagagcaagaccgagttcgacttcaacatcgacccaaagcctagcgagggacctggcacaaagtatctgaagagcaacagccggagccagcagaataggcactccttcatggagtcctctcagtctaaggccggcaccctgcagccaaacgagaagcagagcaggcactcctacatcgacaccatcccacagagcagccggagcccctcctatcggacaaaggccaagtctcacggcgccctgtctgatagcaagtccgtgtctaatctgagcgaggccagagcccagatcgcagagcccagcacctccaggtactttccttctagctgtctggatctgaactctcctacaagcccaacacccaccagacacagcgacacaaggaccctgctgtctccaagcggcagaaataacaggaacgagggcaccctggacagccggcggaccacaaccaggcacagcaagacaatggaggagctgaagctgccagagcacatggattcctctcactcccactctctgagcgccccccacgagtccttctcttacggcctgggctatacctcccccttcagcagccagcagcgcccccaccggcactctatgtacgtgacaagagataaggtgagggcaaagggcctggacggcagcctgtccatcggacagggaatggcagcccgggccaactccctgcagctgctgtctcctcagccaggagagcagctgccaccagagatgaccgtggcacggagcagcgtgaaggagacaagcagggagggcacctcctctttccacacaagacagaagtccgagggcggcgtgtatcacgatccccactctgacgatggcacagcccctaaggagaacaggcacctgtacaatgaccccgtgcctaggagggtgggctccttctatcgcgtgccatctccccggcctgataatagctttcacgagaataacgtgagcacccgggtgagcagcctgccatctgagtctagctccggcacaaaccactctaagaggcagcccgcctttgacccttggaagagcccagagaatatctctcacagcgagcagctgaaggagaaggagaagcagggcttctttcgcagcatgaagaagaagaagaagaagagccagaccgtgcctaactccgattctccagacctgctgaccctgcagaagtccatccacagcgcctccacaccctctagcagacctaaggagtggaggcctgagaagatcagcgacctgcagacccagagccagccactgaagtccctgcggaagctgctgcacctgtcctctgccagcaaccacccagccagctccgatccaaggttccagcccctgacagcccagcagaccaagaacagcttcagcgagatcagaatccaccctctgtcccaggcctctggaggctctagcaacatcaggcaggagccagcaccaaagggccggcccgccctgcagctgcctggccagatggacccaggctggcacgtgtcctctgtgacaagatccgccaccgagggcccatcctactctgagcagctgggagcaaagagcggacctaatggacacccatataacaggaccaatagatccaggatgcccaatctgaacgatctgaaggagacagccctg

SEQ ID NO: 142 - DNA, 3195 bp, Artificial Sequence
  DNA sequence for MBIP-TATkappa28-CDKL5_107-FH [1-10NQ] (human optimized)
atgaagctgtccctggtggccgctatgctgctgctgctgtctctggtcgctgccatgttattactgctgtctgccgctagggccggggacgcagcacagcccgcaagaagagcaagaagaactaaactggccgcttacgcaaggaaggcagcaagacaggcaagagcaggcggcggcggctccaagatccccaatatcggcaacgtgatgaataagttcgagatcctgggagtggtgggagagggagcctacggcgtggtgctgaagtgcagacacaaggagacacacgagatcgtggccatcaagaagtttaaggacagcgaggagaatgaggaggtgaaggagacaaccctgcgcgagctgaagatgctgcggacactgaagcaggagaacatcgtggagctgaaggaggccttccggagaaggggcaagctgtacctggtgtttgagtatgtggagaagaacatgctggagctgctggaggagatgcctaatggcgtgccccctgagaaggtgaagtcctacatctatcagctgatcaaggccatccactggtgccacaagaacgatatcgtgcaccgcgacatcaagcccgagaacctgctgatctcccacaatgacgtgctgaagctgtgcgacttcggctttgcccggcagctgagcgagggcaacaatgcccagtacacagagtatgtggccacccgctggtacagaagccccgagctgctgctgggcgccccctatggcaagagcgtggatatgtggtccgtgggctgcatcctgggcgagctgtctgatggccagcctctgttcccaggcgagagcgagatcgaccagctgtttaccatccagaaggtgctgggccctctgccaagcgagcagatgaagctgttctactccaacccaaggttccacggcctgaggtttccagccgtgaatcaccctcagagcctggagcgccggtatctgggcatcctgaactccgtgctgctggacctgatgaagaacctgctgaagctggaccccgccgacagatacctgaccgagcagtgtctgaatcaccctacatttcagacccagagactgctggataggagcccttcccgctctgccaagcggaagccatatcacgtggagagcagcaccctgtccaatcgcaaccaggccggcaagtctacagccctgcagagccaccaccggagcaactccaaggatatccagcagctgtccgtgggcctgcctagggccgacgagggcctgccagcacaggagagcttcctgaatggaaacctggcaggagcctctctgagcccactgcacacaaagacctaccaggcctctagccagcccggctccacatctaaggacctgaccaacaataacatcccacacctgctgtctcccaaggaggccaagagcaagaccgagttcgacttcaacatcgacccaaagcctagcgagggacctggcacaaagtatctgaagagcaacagccggagccagcagaataggcactccttcatggagtcctctcagtctaaggccggcaccctgcagccaaacgagaagcagagcaggcactcctacatcgacaccatcccacagagcagccggagcccctcctatcggacaaaggccaagtctcacggcgccctgtctgatagcaagtccgtgtctcagctgagcgaggccagagcccagatcgcagagcccagcacctccaggtactttccttctagctgtctggatctgaactctcctacaagcccaacacccaccagacacagcgacacaaggaccctgctgtctccaagcggcagaaataacaggaacgagggcaccctggacagccggcggaccacaaccaggcacagcaagacaatggaggagctgaagctgccagagcacatggattcctctcactcccactctctgagcgccccccacgagtccttctcttacggcctgggctatacctcccccttcagcagccagcagcgcccccaccggcactctatgtacgtgacaagagataaggtgagggcaaagggcctggacggcagcctgtccatcggacagggaatggcagcccgggccaactccctgcagctgctgtctcctcagccaggagagcagctgccaccagagatgaccgtggcacggagcagcgtgaaggagacaagcagggagggcacctcctctttccacacaagacagaagtccgagggcggcgtgtatcacgatccccactctgacgatggcacagcccctaaggagaacaggcacctgtacaatgaccccgtgcctaggagggtgggctccttctatcgcgtgccatctccccggcctgataatagctttcacgagaatcaggtgagcacccgggtgagcagcctgccatctgagtctagctccggcacacagcactctaagaggcagcccgcctttgacccttggaagagcccagagcagatctctcacagcgagcagctgaaggagaaggagaagcagggcttctttcgcagcatgaagaagaagaagaagaagagccagaccgtgcctaactccgattctccagacctgctgaccctgcagaagtccatccacagcgcctccacaccctctagcagacctaaggagtggaggcctgagaagatcagcgacctgcagacccagagccagccactgaagtccctgcggaagctgctgcacctgtcctctgccagcaaccacccagccagctccgatccaaggttccagcccctgacagcccagcagaccaagaacagcttcagcgagatcagaatccaccctctgtcccaggcctctggaggctctagcaacatcaggcaggagccagcaccaaagggccggcccgccctgcagctgcctggccagatggacccaggctggcacgtgtcctctgtgacaagatccgccaccgagggcccatcctactctgagcagctgggagcaaagagcggacctaatggacacccatatcagaggacccagagatccaggatgcccaatctgaacgatctgaaggagacagccctgggaggaggaggcagcgagaacctgtacttccagggcgattataaggaccacgatggcgactacaaggaccacgacattgactacaaggacgacgacgataaagacggagcaccccatcaccaccaccatcattga

SEQ ID NO: 143 - DNA, 2877 bp, Artificial Sequence
  DNA sequence for CDKL5_107 [1-10NQ] (human optimized)
aagatccccaatatcggcaacgtgatgaataagttcgagatcctgggagtggtgggagagggagcctacggcgtggtgctgaagtgcagacacaaggagacacacgagatcgtggccatcaagaagtttaaggacagcgaggagaatgaggaggtgaaggagacaaccctgcgcgagctgaagatgctgcggacactgaagcaggagaacatcgtggagctgaaggaggccttccggagaaggggcaagctgtacctggtgtttgagtatgtggagaagaacatgctggagctgctggaggagatgcctaatggcgtgccccctgagaaggtgaagtcctacatctatcagctgatcaaggccatccactggtgccacaagaacgatatcgtgcaccgcgacatcaagcccgagaacctgctgatctcccacaatgacgtgctgaagctgtgcgacttcggctttgcccggcagctgagcgagggcaacaatgcccagtacacagagtatgtggccacccgctggtacagaagccccgagctgctgctgggcgccccctatggcaagagcgtggatatgtggtccgtgggctgcatcctgggcgagctgtctgatggccagcctctgttcccaggcgagagcgagatcgaccagctgtttaccatccagaaggtgctgggccctctgccaagcgagcagatgaagctgttctactccaacccaaggttccacggcctgaggtttccagccgtgaatcaccctcagagcctggagcgccggtatctgggcatcctgaactccgtgctgctggacctgatgaagaacctgctgaagctggaccccgccgacagatacctgaccgagcagtgtctgaatcaccctacatttcagacccagagactgctggataggagcccttcccgctctgccaagcggaagccatatcacgtggagagcagcaccctgtccaatcgcaaccaggccggcaagtctacagccctgcagagccaccaccggagcaactccaaggatatccagcagctgtccgtgggcctgcctagggccgacgagggcctgccagcacaggagagcttcctgaatggaaacctggcaggagcctctctgagcccactgcacacaaagacctaccaggcctctagccagcccggctccacatctaaggacctgaccaacaataacatcccacacctgctgtctcccaaggaggccaagagcaagaccgagttcgacttcaacatcgacccaaagcctagcgagggacctggcacaaagtatctgaagagcaacagccggagccagcagaataggcactccttcatggagtcctctcagtctaaggccggcaccctgcagccaaacgagaagcagagcaggcactcctacatcgacaccatcccacagagcagccggagcccctcctatcggacaaaggccaagtctcacggcgccctgtctgatagcaagtccgtgtctcagctgagcgaggccagagcccagatcgcagagcccagcacctccaggtactttccttctagctgtctggatctgaactctcctacaagcccaacacccaccagacacagcgacacaaggaccctgctgtctccaagcggcagaaataacaggaacgagggcaccctggacagccggcggaccacaaccaggcacagcaagacaatggaggagctgaagctgccagagcacatggattcctctcactcccactctctgagcgccccccacgagtccttctcttacggcctgggctatacctcccccttcagcagccagcagcgcccccaccggcactctatgtacgtgacaagagataaggtgagggcaaagggcctggacggcagcctgtccatcggacagggaatggcagcccgggccaactccctgcagctgctgtctcctcagccaggagagcagctgccaccagagatgaccgtggcacggagcagcgtgaaggagacaagcagggagggcacctcctctttccacacaagacagaagtccgagggcggcgtgtatcacgatccccactctgacgatggcacagcccctaaggagaacaggcacctgtacaatgaccccgtgcctaggagggtgggctccttctatcgcgtgccatctccccggcctgataatagctttcacgagaatcaggtgagcacccgggtgagcagcctgccatctgagtctagctccggcacacagcactctaagaggcagcccgcctttgacccttggaagagcccagagcagatctctcacagcgagcagctgaaggagaaggagaagcagggcttctttcgcagcatgaagaagaagaagaagaagagccagaccgtgcctaactccgattctccagacctgctgaccctgcagaagtccatccacagcgcctccacaccctctagcagacctaaggagtggaggcctgagaagatcagcgacctgcagacccagagccagccactgaagtccctgcggaagctgctgcacctgtcctctgccagcaaccacccagccagctccgatccaaggttccagcccctgacagcccagcagaccaagaacagcttcagcgagatcagaatccaccctctgtcccaggcctctggaggctctagcaacatcaggcaggagccagcaccaaagggccggcccgccctgcagctgcctggccagatggacccaggctggcacgtgtcctctgtgacaagatccgccaccgagggcccatcctactctgagcagctgggagcaaagagcggacctaatggacacccatatcagaggacccagagatccaggatgcccaatctgaacgatctgaaggagacagccctg

SEQ ID NO: 144 - DNA, 3195 bp, Artificial Sequence
  DNA sequence for MBIP-TATkappa28-CDKL5_107-FH [1-7,9-10NQ] (human optimized)
atgaagctgtccctggtggccgctatgctgctgctgctgtctctggtcgctgccatgttattactgctgtctgccgctagggccggggacgcagcacagcccgcaagaagagcaagaagaactaaactggccgcttacgcaaggaaggcagcaagacaggcaagagcaggcggcggcggctccaagatccccaatatcggcaacgtgatgaataagttcgagatcctgggagtggtgggagagggagcctacggcgtggtgctgaagtgcagacacaaggagacacacgagatcgtggccatcaagaagtttaaggacagcgaggagaatgaggaggtgaaggagacaaccctgcgcgagctgaagatgctgcggacactgaagcaggagaacatcgtggagctgaaggaggccttccggagaaggggcaagctgtacctggtgtttgagtatgtggagaagaacatgctggagctgctggaggagatgcctaatggcgtgccccctgagaaggtgaagtcctacatctatcagctgatcaaggccatccactggtgccacaagaacgatatcgtgcaccgcgacatcaagcccgagaacctgctgatctcccacaatgacgtgctgaagctgtgcgacttcggctttgcccggcagctgagcgagggcaacaatgcccagtacacagagtatgtggccacccgctggtacagaagccccgagctgctgctgggcgccccctatggcaagagcgtggatatgtggtccgtgggctgcatcctgggcgagctgtctgatggccagcctctgttcccaggcgagagcgagatcgaccagctgtttaccatccagaaggtgctgggccctctgccaagcgagcagatgaagctgttctactccaacccaaggttccacggcctgaggtttccagccgtgaatcaccctcagagcctggagcgccggtatctgggcatcctgaactccgtgctgctggacctgatgaagaacctgctgaagctggaccccgccgacagatacctgaccgagcagtgtctgaatcaccctacatttcagacccagagactgctggataggagcccttcccgctctgccaagcggaagccatatcacgtggagagcagcaccctgtccaatcgcaaccaggccggcaagtctacagccctgcagagccaccaccggagcaactccaaggatatccagcagctgtccgtgggcctgcctagggccgacgagggcctgccagcaaacgagagcttcctgaatggaaacctggcaggagcctctctgagcccactgcacacaaagacctaccaggcctctagccagcccggctccacatctaaggacctgaccaacaataacatcccacacctgctgtctcccaaggaggccaagagcaagaccgagttcgacttcaacatcgacccaaagcctagcgagggacctggcacaaagtatctgaagagcaacagccggagccagcagaataggcactccttcatggagtcctctcagtctaaggccggcaccctgcagccaaacgagaagcagagcaggcactcctacatcgacaccatcccacagagcagccggagcccctcctatcggacaaaggccaagtctcacggcgccctgtctgatagcaagtccgtgtctcagctgagcgaggccagagcccagatcgcagagcccagcacctccaggtactttccttctagctgtctggatctgaactctcctacaagcccaacacccaccagacacagcgacacaaggaccctgctgtctccaagcggcagaaataacaggaacgagggcaccctggacagccggcggaccacaaccaggcacagcaagacaatggaggagctgaagctgccagagcacatggattcctctcactcccactctctgagcgccccccacgagtccttctcttacggcctgggctatacctcccccttcagcagccagcagcgcccccaccggcactctatgtacgtgacaagagataaggtgagggcaaagggcctggacggcagcctgtccatcggacagggaatggcagcccgggccaactccctgcagctgctgtctcctcagccaggagagcagctgccaccagagatgaccgtggcacggagcagcgtgaaggagacaagcagggagggcacctcctctttccacacaagacagaagtccgagggcggcgtgtatcacgatccccactctgacgatggcacagcccctaaggagaacaggcacctgtacaatgaccccgtgcctaggagggtgggctccttctatcgcgtgccatctccccggcctgataatagctttcacgagaatcaggtgagcacccgggtgagcagcctgccatctgagtctagctccggcacacagcactctaagaggcagcccgcctttgacccttggaagagcccagagcagatctctcacagcgagcagctgaaggagaaggagaagcagggcttctttcgcagcatgaagaagaagaagaagaagagccagaccgtgcctaactccgattctccagacctgctgaccctgcagaagtccatccacagcgcctccacaccctctagcagacctaaggagtggaggcctgagaagatcagcgacctgcagacccagagccagccactgaagtccctgcggaagctgctgcacctgtcctctgccagcaaccacccagccagctccgatccaaggttccagcccctgacagcccagcagaccaagaacagcttcagcgagatcagaatccaccctctgtcccaggcctctggaggctctagcaacatcaggcaggagccagcaccaaagggccggcccgccctgcagctgcctggccagatggacccaggctggcacgtgtcctctgtgacaagatccgccaccgagggcccatcctactctgagcagctgggagcaaagagcggacctaatggacacccatatcagaggacccagagatccaggatgcccaatctgaacgatctgaaggagacagccctgggaggaggaggcagcgagaacctgtacttccagggcgattataaggaccacgatggcgactacaaggaccacgacattgactacaaggacgacgacgataaagacggagcaccccatcaccaccaccatcattga

SEQ ID NO: 145 - DNA, 2877 bp, Artificial Sequence
  DNA sequence for CDKL5_107 [1-7,9-10NQ] (human optimized)
aagatccccaatatcggcaacgtgatgaataagttcgagatcctgggagtggtgggagagggagcctacggcgtggtgctgaagtgcagacacaaggagacacacgagatcgtggccatcaagaagtttaaggacagcgaggagaatgaggaggtgaaggagacaaccctgcgcgagctgaagatgctgcggacactgaagcaggagaacatcgtggagctgaaggaggccttccggagaaggggcaagctgtacctggtgtttgagtatgtggagaagaacatgctggagctgctggaggagatgcctaatggcgtgccccctgagaaggtgaagtcctacatctatcagctgatcaaggccatccactggtgccacaagaacgatatcgtgcaccgcgacatcaagcccgagaacctgctgatctcccacaatgacgtgctgaagctgtgcgacttcggctttgcccggcagctgagcgagggcaacaatgcccagtacacagagtatgtggccacccgctggtacagaagccccgagctgctgctgggcgccccctatggcaagagcgtggatatgtggtccgtgggctgcatcctgggcgagctgtctgatggccagcctctgttcccaggcgagagcgagatcgaccagctgtttaccatccagaaggtgctgggccctctgccaagcgagcagatgaagctgttctactccaacccaaggttccacggcctgaggtttccagccgtgaatcaccctcagagcctggagcgccggtatctgggcatcctgaactccgtgctgctggacctgatgaagaacctgctgaagctggaccccgccgacagatacctgaccgagcagtgtctgaatcaccctacatttcagacccagagactgctggataggagcccttcccgctctgccaagcggaagccatatcacgtggagagcagcaccctgtccaatcgcaaccaggccggcaagtctacagccctgcagagccaccaccggagcaactccaaggatatccagcagctgtccgtgggcctgcctagggccgacgagggcctgccagcaaacgagagcttcctgaatggaaacctggcaggagcctctctgagcccactgcacacaaagacctaccaggcctctagccagcccggctccacatctaaggacctgaccaacaataacatcccacacctgctgtctcccaaggaggccaagagcaagaccgagttcgacttcaacatcgacccaaagcctagcgagggacctggcacaaagtatctgaagagcaacagccggagccagcagaataggcactccttcatggagtcctctcagtctaaggccggcaccctgcagccaaacgagaagcagagcaggcactcctacatcgacaccatcccacagagcagccggagcccctcctatcggacaaaggccaagtctcacggcgccctgtctgatagcaagtccgtgtctcagctgagcgaggccagagcccagatcgcagagcccagcacctccaggtactttccttctagctgtctggatctgaactctcctacaagcccaacacccaccagacacagcgacacaaggaccctgctgtctccaagcggcagaaataacaggaacgagggcaccctggacagccggcggaccacaaccaggcacagcaagacaatggaggagctgaagctgccagagcacatggattcctctcactcccactctctgagcgccccccacgagtccttctcttacggcctgggctatacctcccccttcagcagccagcagcgcccccaccggcactctatgtacgtgacaagagataaggtgagggcaaagggcctggacggcagcctgtccatcggacagggaatggcagcccgggccaactccctgcagctgctgtctcctcagccaggagagcagctgccaccagagatgaccgtggcacggagcagcgtgaaggagacaagcagggagggcacctcctctttccacacaagacagaagtccgagggcggcgtgtatcacgatccccactctgacgatggcacagcccctaaggagaacaggcacctgtacaatgaccccgtgcctaggagggtgggctccttctatcgcgtgccatctccccggcctgataatagctttcacgagaatcaggtgagcacccgggtgagcagcctgccatctgagtctagctccggcacacagcactctaagaggcagcccgcctttgacccttggaagagcccagagcagatctctcacagcgagcagctgaaggagaaggagaagcagggcttctttcgcagcatgaagaagaagaagaagaagagccagaccgtgcctaactccgattctccagacctgctgaccctgcagaagtccatccacagcgcctccacaccctctagcagacctaaggagtggaggcctgagaagatcagcgacctgcagacccagagccagccactgaagtccctgcggaagctgctgcacctgtcctctgccagcaaccacccagccagctccgatccaaggttccagcccctgacagcccagcagaccaagaacagcttcagcgagatcagaatccaccctctgtcccaggcctctggaggctctagcaacatcaggcaggagccagcaccaaagggccggcccgccctgcagctgcctggccagatggacccaggctggcacgtgtcctctgtgacaagatccgccaccgagggcccatcctactctgagcagctgggagcaaagagcggacctaatggacacccatatcagaggacccagagatccaggatgcccaatctgaacgatctgaaggagacagccctg

SEQ ID NO: 146 - DNA, 3195 bp, Artificial Sequence
  DNA sequence for MBIP-TATkappa28-CDKL5_107-FH [1-8, 10NQ] (human optimized)
atgaagctgtccctggtggccgctatgctgctgctgctgtctctggtcgctgccatgttattactgctgtctgccgctagggccggggacgcagcacagcccgcaagaagagcaagaagaactaaactggccgcttacgcaaggaaggcagcaagacaggcaagagcaggcggcggcggctccaagatccccaatatcggcaacgtgatgaataagttcgagatcctgggagtggtgggagagggagcctacggcgtggtgctgaagtgcagacacaaggagacacacgagatcgtggccatcaagaagtttaaggacagcgaggagaatgaggaggtgaaggagacaaccctgcgcgagctgaagatgctgcggacactgaagcaggagaacatcgtggagctgaaggaggccttccggagaaggggcaagctgtacctggtgtttgagtatgtggagaagaacatgctggagctgctggaggagatgcctaatggcgtgccccctgagaaggtgaagtcctacatctatcagctgatcaaggccatccactggtgccacaagaacgatatcgtgcaccgcgacatcaagcccgagaacctgctgatctcccacaatgacgtgctgaagctgtgcgacttcggctttgcccggcagctgagcgagggcaacaatgcccagtacacagagtatgtggccacccgctggtacagaagccccgagctgctgctgggcgccccctatggcaagagcgtggatatgtggtccgtgggctgcatcctgggcgagctgtctgatggccagcctctgttcccaggcgagagcgagatcgaccagctgtttaccatccagaaggtgctgggccctctgccaagcgagcagatgaagctgttctactccaacccaaggttccacggcctgaggtttccagccgtgaatcaccctcagagcctggagcgccggtatctgggcatcctgaactccgtgctgctggacctgatgaagaacctgctgaagctggaccccgccgacagatacctgaccgagcagtgtctgaatcaccctacatttcagacccagagactgctggataggagcccttcccgctctgccaagcggaagccatatcacgtggagagcagcaccctgtccaatcgcaaccaggccggcaagtctacagccctgcagagccaccaccggagcaactccaaggatatccagcagctgtccgtgggcctgcctagggccgacgagggcctgccagcacaggagagcttcctgaatggaaacctggcaggagcctctctgagcccactgcacacaaagacctaccaggcctctagccagcccggctccacatctaaggacctgaccaacaataacatcccacacctgctgtctcccaaggaggccaagagcaagaccgagttcgacttcaacatcgacccaaagcctagcgagggacctggcacaaagtatctgaagagcaacagccggagccagcagaataggcactccttcatggagtcctctcagtctaaggccggcaccctgcagccaaacgagaagcagagcaggcactcctacatcgacaccatcccacagagcagccggagcccctcctatcggacaaaggccaagtctcacggcgccctgtctgatagcaagtccgtgtctcagctgagcgaggccagagcccagatcgcagagcccagcacctccaggtactttccttctagctgtctggatctgaactctcctacaagcccaacacccaccagacacagcgacacaaggaccctgctgtctccaagcggcagaaataacaggaacgagggcaccctggacagccggcggaccacaaccaggcacagcaagacaatggaggagctgaagctgccagagcacatggattcctctcactcccactctctgagcgccccccacgagtccttctcttacggcctgggctatacctcccccttcagcagccagcagcgcccccaccggcactctatgtacgtgacaagagataaggtgagggcaaagggcctggacggcagcctgtccatcggacagggaatggcagcccgggccaactccctgcagctgctgtctcctcagccaggagagcagctgccaccagagatgaccgtggcacggagcagcgtgaaggagacaagcagggagggcacctcctctttccacacaagacagaagtccgagggcggcgtgtatcacgatccccactctgacgatggcacagcccctaaggagaacaggcacctgtacaatgaccccgtgcctaggagggtgggctccttctatcgcgtgccatctccccggcctgataatagctttcacgagaataacgtgagcacccgggtgagcagcctgccatctgagtctagctccggcacacagcactctaagaggcagcccgcctttgacccttggaagagcccagagcagatctctcacagcgagcagctgaaggagaaggagaagcagggcttctttcgcagcatgaagaagaagaagaagaagagccagaccgtgcctaactccgattctccagacctgctgaccctgcagaagtccatccacagcgcctccacaccctctagcagacctaaggagtggaggcctgagaagatcagcgacctgcagacccagagccagccactgaagtccctgcggaagctgctgcacctgtcctctgccagcaaccacccagccagctccgatccaaggttccagcccctgacagcccagcagaccaagaacagcttcagcgagatcagaatccaccctctgtcccaggcctctggaggctctagcaacatcaggcaggagccagcaccaaagggccggcccgccctgcagctgcctggccagatggacccaggctggcacgtgtcctctgtgacaagatccgccaccgagggcccatcctactctgagcagctgggagcaaagagcggacctaatggacacccatatcagaggacccagagatccaggatgcccaatctgaacgatctgaaggagacagccctgggaggaggaggcagcgagaacctgtacttccagggcgattataaggaccacgatggcgactacaaggaccacgacattgactacaaggacgacgacgataaagacggagcaccccatcaccaccaccatcattga

SEQ ID NO: 147 - DNA, 2877 bp, Artificial Sequence
  DNA sequence for CDKL5_107 [1-8,10NQ] (human optimized)
aagatccccaatatcggcaacgtgatgaataagttcgagatcctgggagtggtgggagagggagcctacggcgtggtgctgaagtgcagacacaaggagacacacgagatcgtggccatcaagaagtttaaggacagcgaggagaatgaggaggtgaaggagacaaccctgcgcgagctgaagatgctgcggacactgaagcaggagaacatcgtggagctgaaggaggccttccggagaaggggcaagctgtacctggtgtttgagtatgtggagaagaacatgctggagctgctggaggagatgcctaatggcgtgccccctgagaaggtgaagtcctacatctatcagctgatcaaggccatccactggtgccacaagaacgatatcgtgcaccgcgacatcaagcccgagaacctgctgatctcccacaatgacgtgctgaagctgtgcgacttcggctttgcccggcagctgagcgagggcaacaatgcccagtacacagagtatgtggccacccgctggtacagaagccccgagctgctgctgggcgccccctatggcaagagcgtggatatgtggtccgtgggctgcatcctgggcgagctgtctgatggccagcctctgttcccaggcgagagcgagatcgaccagctgtttaccatccagaaggtgctgggccctctgccaagcgagcagatgaagctgttctactccaacccaaggttccacggcctgaggtttccagccgtgaatcaccctcagagcctggagcgccggtatctgggcatcctgaactccgtgctgctggacctgatgaagaacctgctgaagctggaccccgccgacagatacctgaccgagcagtgtctgaatcaccctacatttcagacccagagactgctggataggagcccttcccgctctgccaagcggaagccatatcacgtggagagcagcaccctgtccaatcgcaaccaggccggcaagtctacagccctgcagagccaccaccggagcaactccaaggatatccagcagctgtccgtgggcctgcctagggccgacgagggcctgccagcacaggagagcttcctgaatggaaacctggcaggagcctctctgagcccactgcacacaaagacctaccaggcctctagccagcccggctccacatctaaggacctgaccaacaataacatcccacacctgctgtctcccaaggaggccaagagcaagaccgagttcgacttcaacatcgacccaaagcctagcgagggacctggcacaaagtatctgaagagcaacagccggagccagcagaataggcactccttcatggagtcctctcagtctaaggccggcaccctgcagccaaacgagaagcagagcaggcactcctacatcgacaccatcccacagagcagccggagcccctcctatcggacaaaggccaagtctcacggcgccctgtctgatagcaagtccgtgtctcagctgagcgaggccagagcccagatcgcagagcccagcacctccaggtactttccttctagctgtctggatctgaactctcctacaagcccaacacccaccagacacagcgacacaaggaccctgctgtctccaagcggcagaaataacaggaacgagggcaccctggacagccggcggaccacaaccaggcacagcaagacaatggaggagctgaagctgccagagcacatggattcctctcactcccactctctgagcgccccccacgagtccttctcttacggcctgggctatacctcccccttcagcagccagcagcgcccccaccggcactctatgtacgtgacaagagataaggtgagggcaaagggcctggacggcagcctgtccatcggacagggaatggcagcccgggccaactccctgcagctgctgtctcctcagccaggagagcagctgccaccagagatgaccgtggcacggagcagcgtgaaggagacaagcagggagggcacctcctctttccacacaagacagaagtccgagggcggcgtgtatcacgatccccactctgacgatggcacagcccctaaggagaacaggcacctgtacaatgaccccgtgcctaggagggtgggctccttctatcgcgtgccatctccccggcctgataatagctttcacgagaataacgtgagcacccgggtgagcagcctgccatctgagtctagctccggcacacagcactctaagaggcagcccgcctttgacccttggaagagcccagagcagatctctcacagcgagcagctgaaggagaaggagaagcagggcttctttcgcagcatgaagaagaagaagaagaagagccagaccgtgcctaactccgattctccagacctgctgaccctgcagaagtccatccacagcgcctccacaccctctagcagacctaaggagtggaggcctgagaagatcagcgacctgcagacccagagccagccactgaagtccctgcggaagctgctgcacctgtcctctgccagcaaccacccagccagctccgatccaaggttccagcccctgacagcccagcagaccaagaacagcttcagcgagatcagaatccaccctctgtcccaggcctctggaggctctagcaacatcaggcaggagccagcaccaaagggccggcccgccctgcagctgcctggccagatggacccaggctggcacgtgtcctctgtgacaagatccgccaccgagggcccatcctactctgagcagctgggagcaaagagcggacctaatggacacccatatcagaggacccagagatccaggatgcccaatctgaacgatctgaaggagacagccctg

SEQ ID NO: 148 - DNA, 3195 bp, Artificial Sequence
  DNA sequence for MBIP-TATkappa28-CDKL5_107-FH [1-9NQ] (human optimized)
atgaagctgtccctggtggccgctatgctgctgctgctgtctctggtcgctgccatgttattactgctgtctgccgctagggccggggacgcagcacagcccgcaagaagagcaagaagaactaaactggccgcttacgcaaggaaggcagcaagacaggcaagagcaggcggcggcggctccaagatccccaatatcggcaacgtgatgaataagttcgagatcctgggagtggtgggagagggagcctacggcgtggtgctgaagtgcagacacaaggagacacacgagatcgtggccatcaagaagtttaaggacagcgaggagaatgaggaggtgaaggagacaaccctgcgcgagctgaagatgctgcggacactgaagcaggagaacatcgtggagctgaaggaggccttccggagaaggggcaagctgtacctggtgtttgagtatgtggagaagaacatgctggagctgctggaggagatgcctaatggcgtgccccctgagaaggtgaagtcctacatctatcagctgatcaaggccatccactggtgccacaagaacgatatcgtgcaccgcgacatcaagcccgagaacctgctgatctcccacaatgacgtgctgaagctgtgcgacttcggctttgcccggcagctgagcgagggcaacaatgcccagtacacagagtatgtggccacccgctggtacagaagccccgagctgctgctgggcgccccctatggcaagagcgtggatatgtggtccgtgggctgcatcctgggcgagctgtctgatggccagcctctgttcccaggcgagagcgagatcgaccagctgtttaccatccagaaggtgctgggccctctgccaagcgagcagatgaagctgttctactccaacccaaggttccacggcctgaggtttccagccgtgaatcaccctcagagcctggagcgccggtatctgggcatcctgaactccgtgctgctggacctgatgaagaacctgctgaagctggaccccgccgacagatacctgaccgagcagtgtctgaatcaccctacatttcagacccagagactgctggataggagcccttcccgctctgccaagcggaagccatatcacgtggagagcagcaccctgtccaatcgcaaccaggccggcaagtctacagccctgcagagccaccaccggagcaactccaaggatatccagcagctgtccgtgggcctgcctagggccgacgagggcctgccagcacaggagagcttcctgaatggaaacctggcaggagcctctctgagcccactgcacacaaagacctaccaggcctctagccagcccggctccacatctaaggacctgaccaacaataacatcccacacctgctgtctcccaaggaggccaagagcaagaccgagttcgacttcaacatcgacccaaagcctagcgagggacctggcacaaagtatctgaagagcaacagccggagccagcagaataggcactccttcatggagtcctctcagtctaaggccggcaccctgcagccaaacgagaagcagagcaggcactcctacatcgacaccatcccacagagcagccggagcccctcctatcggacaaaggccaagtctcacggcgccctgtctgatagcaagtccgtgtctcagctgagcgaggccagagcccagatcgcagagcccagcacctccaggtactttccttctagctgtctggatctgaactctcctacaagcccaacacccaccagacacagcgacacaaggaccctgctgtctccaagcggcagaaataacaggaacgagggcaccctggacagccggcggaccacaaccaggcacagcaagacaatggaggagctgaagctgccagagcacatggattcctctcactcccactctctgagcgccccccacgagtccttctcttacggcctgggctatacctcccccttcagcagccagcagcgcccccaccggcactctatgtacgtgacaagagataaggtgagggcaaagggcctggacggcagcctgtccatcggacagggaatggcagcccgggccaactccctgcagctgctgtctcctcagccaggagagcagctgccaccagagatgaccgtggcacggagcagcgtgaaggagacaagcagggagggcacctcctctttccacacaagacagaagtccgagggcggcgtgtatcacgatccccactctgacgatggcacagcccctaaggagaacaggcacctgtacaatgaccccgtgcctaggagggtgggctccttctatcgcgtgccatctccccggcctgataatagctttcacgagaatcaggtgagcacccgggtgagcagcctgccatctgagtctagctccggcacaaaccactctaagaggcagcccgcctttgacccttggaagagcccagagcagatctctcacagcgagcagctgaaggagaaggagaagcagggcttctttcgcagcatgaagaagaagaagaagaagagccagaccgtgcctaactccgattctccagacctgctgaccctgcagaagtccatccacagcgcctccacaccctctagcagacctaaggagtggaggcctgagaagatcagcgacctgcagacccagagccagccactgaagtccctgcggaagctgctgcacctgtcctctgccagcaaccacccagccagctccgatccaaggttccagcccctgacagcccagcagaccaagaacagcttcagcgagatcagaatccaccctctgtcccaggcctctggaggctctagcaacatcaggcaggagccagcaccaaagggccggcccgccctgcagctgcctggccagatggacccaggctggcacgtgtcctctgtgacaagatccgccaccgagggcccatcctactctgagcagctgggagcaaagagcggacctaatggacacccatatcagaggacccagagatccaggatgcccaatctgaacgatctgaaggagacagccctgggaggaggaggcagcgagaacctgtacttccagggcgattataaggaccacgatggcgactacaaggaccacgacattgactacaaggacgacgacgataaagacggagcaccccatcaccaccaccatcattga

SEQ ID NO: 149 - DNA, 2877 bp, Artificial Sequence
  DNA sequence for CDKL5_107 [1-9NQ] (human optimized)
aagatccccaatatcggcaacgtgatgaataagttcgagatcctgggagtggtgggagagggagcctacggcgtggtgctgaagtgcagacacaaggagacacacgagatcgtggccatcaagaagtttaaggacagcgaggagaatgaggaggtgaaggagacaaccctgcgcgagctgaagatgctgcggacactgaagcaggagaacatcgtggagctgaaggaggccttccggagaaggggcaagctgtacctggtgtttgagtatgtggagaagaacatgctggagctgctggaggagatgcctaatggcgtgccccctgagaaggtgaagtcctacatctatcagctgatcaaggccatccactggtgccacaagaacgatatcgtgcaccgcgacatcaagcccgagaacctgctgatctcccacaatgacgtgctgaagctgtgcgacttcggctttgcccggcagctgagcgagggcaacaatgcccagtacacagagtatgtggccacccgctggtacagaagccccgagctgctgctgggcgccccctatggcaagagcgtggatatgtggtccgtgggctgcatcctgggcgagctgtctgatggccagcctctgttcccaggcgagagcgagatcgaccagctgtttaccatccagaaggtgctgggccctctgccaagcgagcagatgaagctgttctactccaacccaaggttccacggcctgaggtttccagccgtgaatcaccctcagagcctggagcgccggtatctgggcatcctgaactccgtgctgctggacctgatgaagaacctgctgaagctggaccccgccgacagatacctgaccgagcagtgtctgaatcaccctacatttcagacccagagactgctggataggagcccttcccgctctgccaagcggaagccatatcacgtggagagcagcaccctgtccaatcgcaaccaggccggcaagtctacagccctgcagagccaccaccggagcaactccaaggatatccagcagctgtccgtgggcctgcctagggccgacgagggcctgccagcacaggagagcttcctgaatggaaacctggcaggagcctctctgagcccactgcacacaaagacctaccaggcctctagccagcccggctccacatctaaggacctgaccaacaataacatcccacacctgctgtctcccaaggaggccaagagcaagaccgagttcgacttcaacatcgacccaaagcctagcgagggacctggcacaaagtatctgaagagcaacagccggagccagcagaataggcactccttcatggagtcctctcagtctaaggccggcaccctgcagccaaacgagaagcagagcaggcactcctacatcgacaccatcccacagagcagccggagcccctcctatcggacaaaggccaagtctcacggcgccctgtctgatagcaagtccgtgtctcagctgagcgaggccagagcccagatcgcagagcccagcacctccaggtactttccttctagctgtctggatctgaactctcctacaagcccaacacccaccagacacagcgacacaaggaccctgctgtctccaagcggcagaaataacaggaacgagggcaccctggacagccggcggaccacaaccaggcacagcaagacaatggaggagctgaagctgccagagcacatggattcctctcactcccactctctgagcgccccccacgagtccttctcttacggcctgggctatacctcccccttcagcagccagcagcgcccccaccggcactctatgtacgtgacaagagataaggtgagggcaaagggcctggacggcagcctgtccatcggacagggaatggcagcccgggccaactccctgcagctgctgtctcctcagccaggagagcagctgccaccagagatgaccgtggcacggagcagcgtgaaggagacaagcagggagggcacctcctctttccacacaagacagaagtccgagggcggcgtgtatcacgatccccactctgacgatggcacagcccctaaggagaacaggcacctgtacaatgaccccgtgcctaggagggtgggctccttctatcgcgtgccatctccccggcctgataatagctttcacgagaatcaggtgagcacccgggtgagcagcctgccatctgagtctagctccggcacaaaccactctaagaggcagcccgcctttgacccttggaagagcccagagcagatctctcacagcgagcagctgaaggagaaggagaagcagggcttctttcgcagcatgaagaagaagaagaagaagagccagaccgtgcctaactccgattctccagacctgctgaccctgcagaagtccatccacagcgcctccacaccctctagcagacctaaggagtggaggcctgagaagatcagcgacctgcagacccagagccagccactgaagtccctgcggaagctgctgcacctgtcctctgccagcaaccacccagccagctccgatccaaggttccagcccctgacagcccagcagaccaagaacagcttcagcgagatcagaatccaccctctgtcccaggcctctggaggctctagcaacatcaggcaggagccagcaccaaagggccggcccgccctgcagctgcctggccagatggacccaggctggcacgtgtcctctgtgacaagatccgccaccgagggcccatcctactctgagcagctgggagcaaagagcggacctaatggacacccatatcagaggacccagagatccaggatgcccaatctgaacgatctgaaggagacagccctg

SEQ ID NO: 150 - DNA, 33 bp, Artificial Sequence
  DNA sequence for TATkappa11 (human optimized)
tacgcccggaaggccgcccggcaggccagagcc

SEQ ID NO: 151 - DNA, 81 bp, Artificial Sequence
  DNA sequence for TATkappa28 (human optimized)
gacgcagcacagcccgcaagaagagcaagaagaactaaactggccgcttacgcaaggaaggcagcaagacaggcaagagca

SEQ ID NO: 152 - DNA, 48 bp, Artificial Sequence
  DNA sequence for Antennapedia CPP (human optimized)
cggcagatcaagatttggttccagaaccggagaatgaagtggaagaag

SEQ ID NO: 153 - DNA, 63 bp, Artificial Sequence
  DNA sequence for Transportan CPP (human optimized)
gccggctacctgctgggcaagatcaacctgaaggccctggccgccctggccaagaagatcctg

SEQ ID NO: 154 - DNA, 36 bp, Artificial Sequence
  DNA sequence for P97 CPP (human optimized)
gacagctcccacgccttcaccctggatgagctgcgg

SEQ ID NO: 155 - DNA, 84 bp, Artificial Sequence
  DNA sequence for mBIP (human optimized)
atgaagctgtccctggtggccgctatgctgctgctgctgtctctggtcgctgccatgttattactgctgtctgccgctagggcc

SEQ ID NO: 156 - protein, 67 aa, Artificial Sequence
  IGF
AYRPSETLCGGELVDTLQFVCGDRGFYFSRPASRVSRRSRGIVEECCFRSCDLALLETYCATPAKSE

SEQ ID NO: 157 - protein, 67 aa, Artificial Sequence
  IGF F26S
AYRPSETLCGGELVDTLQFVCGDRGSYFSRPASRVSRRSRGIVEECCFRSCDLALLETYCATPAKSE

SEQ ID NO: 158 - protein, 67 aa, Artificial Sequence
  IGF Y27L
AYRPSETLCGGELVDTLQFVCGDRGFLFSRPASRVSRRSRGIVEECCFRSCDLALLETYCATPAKSE

SEQ ID NO: 159 - protein, 67 aa, Artificial Sequence
  IGF V43L
AYRPSETLCGGELVDTLQFVCGDRGFYFSRPASRVSRRSRGILEECCFRSCDLALLETYCATPAKSE

SEQ ID NO: 160 - protein, 67 aa, Artificial Sequence
  IGF F48T
AYRPSETLCGGELVDTLQFVCGDRGFYFSRPASRVSRRSRGIVEECCTRSCDLALLETYCATPAKSE

SEQ ID NO: 161 - protein, 67 aa, Artificial Sequence
  IGF R49S
AYRPSETLCGGELVDTLQFVCGDRGFYFSRPASRVSRRSRGIVEECCFSSCDLALLETYCATPAKSE

SEQ ID NO: 162 - protein, 67 aa, Artificial Sequence
  IGF S50I
AYRPSETLCGGELVDTLQFVCGDRGFYFSRPASRVSRRSRGIVEECCFRICDLALLETYCATPAKSE

SEQ ID NO: 163 - protein, 67 aa, Artificial Sequence
  IGF A54R
AYRPSETLCGGELVDTLQFVCGDRGFYFSRPASRVSRRSRGIVEECCFRSCDLRLLETYCATPAKSE

SEQ ID NO: 164 - protein, 67 aa, Artificial Sequence
  IGF L55R
AYRPSETLCGGELVDTLQFVCGDRGFYFSRPASRVSRRSRGIVEECCFRSCDLARLETYCATPAKSE

SEQ ID NO: 165 - protein, 67 aa, Artificial Sequence
  IGF F26S, Y27L, V43L, F48T, R49S, S50I, A54R, L55R
AYRPSETLCGGELVDTLQFVCGDRGSLFSRPASRVSRRSRGILEECCTSICDLRRLETYCATPAKSE

SEQ ID NO: 166 - protein, 61 aa, Artificial Sequence
  IGF deltal-7, Y27L, K65R
TLCGGELVDTLQFVCGDRGFLFSRPASRVSRRSRGIVEECCFRSCDLALLETYCATPARSE

SEQ ID NO: 167 - protein, 27 aa, Artificial Sequence
  TATkappakappa28 CPP
DAAQPARRAARTKLAAYARKAARQARA

SEQ ID NO: 168 - protein, 29 aa, Artificial Sequence
  mvBIP
MVKLSLVAAMLLLLSLVAAMLLLLSAARA

SEQ ID NO: 169 - DNA, 84 bp, Artificial Sequence; identical to SEQ ID NO: 155
  Exemplary DNA sequence for mvBIP

SEQ ID NO: 170 - DNA, 84 bp, Artificial Sequence
  Exemplary DNA sequence for TATkappakappa28
tctgatgctgcccagcctgctagaagggccgccaggacaaaactggccgcctatgccagaaaagccgccagacaggccagagcc

SEQ ID NO: 171 - DNA, 84 bp, Artificial Sequence
  Exemplary DNA sequence for TATkappakappa28
agcgacgccgctcaaccagctcgacgcgccgccagaaccaagctggccgcctacgcccggaaggccgccagacaggccagagcc

SEQ ID NO: 172 - DNA, 84 bp, Artificial Sequence
  Exemplary DNA sequence for TATkappakappa28
agcgacgccgcccagcccgccagaagagccgccagaaccaagctggccgcctacgccagaaaggccgccagacaggccagagcc

SEQ ID NO: 173 - DNA, 84 bp, Artificial Sequence
  Exemplary DNA sequence for TATkappakappa28
tctgatgccgcccagcctgccagacgggctgcacggacgaagctggccgcctacgccagaaaggcggccagacaggccagagcc

SEQ ID NO: 174 - protein, 1091 aa, Artificial Sequence
  TwinStrep-3cV2-TATkappa28-hCDKL5-Flag-His-HPC4 (Amino Acid Sequence)
MSAWSHPQFEKGGGSGGGSGGSAWSHPQFEKGSLEVLFQGPDAAQPARRARRTKLAAYARKAARQARAGGGGSKIPNIGNVMNKFEILGVVGEGAYGVVLKCRHKETHEIVAIKKFKDSEENEEVKETTLRELKMLRTLKQENIVELKEAFRRRGKLYLVFEYVEKNMLELLEEMPNGVPPEKVKSYIYQLIKAIHWCHKNDIVHRDIKPENLLISHNDVLKLCDFGFARNLSEGNNANYTEYVATRWYRSPELLLGAPYGKSVDMWSVGCILGELSDGQPLFPGESEIDQLFTIQKVLGPLPSEQMKLFYSNPRFHGLRFPAVNHPQSLERRYLGILNSVLLDLMKNLLKLDPADRYLTEQCLNHPTFQTQRLLDRSPSRSAKRKPYHVESSTLSNRNQAGKSTALQSHHRSNSKDIQNLSVGLPRADEGLPANESFLNGNLAGASLSPLHTKTYQASSQPGSTSKDLTNNNIPHLLSPKEAKSKTEFDFNIDPKPSEGPGTKYLKSNSRSQQNRHSFMESSQSKAGTLQPNEKQSRHSYIDTIPQSSRSPSYRTKAKSHGALSDSKSVSNLSEARAQIAEPSTSRYFPSSCLDLNSPTSPTPTRHSDTRTLLSPSGRNNRNEGTLDSRRTTTRHSKTMEELKLPEHMDSSHSHSLSAPHESFSYGLGYTSPFSSQQRPHRHSMYVTRDKVRAKGLDGSLSIGQGMAARANSLQLLSPQPGEQLPPEMTVARSSVKETSREGTSSFHTRQKSEGGVYHDPHSDDGTAPKENRHLYNDPVPRRVGSFYRVPSPRPDNSFHENNVSTRVSSLPSESSSGTNHSKRQPAFDPWKSPENISHSEQLKEKEKQGFFRSMKKKKKKSQTVPNSDSPDLLTLQKSIHSASTPSSRPKEWRPEKISDLQTQSQPLKSLRKLLHLSSASNHPASSDPRFQPLTAQQTKNSFSEIRIHPLSQASGGSSNIRQEPAPKGRPALQLPGQMDPGWHVSSVTRSATEGPSYSEQLGAKSGPNGHPYNRTNRSRMPNLNDLKETALGAGGGGSLEVLFQGPDYKDHDGDYKDHDIDYKDDDDKDGAPHHHHHHEDQVDPRLIDGK

SEQ ID NO: 175 - DNA, 3276 bp, Artificial Sequence
  TwinStrep-3cV2-TATkappa28-hCDKL5-Flag-His-HPC4 (DNA Sequence)
atgtcagcgtggtcgcatcctcaattcgaaaagggcggcggttcgggtggaggaagtggcggatcggcctggtctcacccgcaattcgaaaagggttccctcgaggtcctttttcaaggtcccgacgctgctcagcctgctcgccgtgccaggagaaccaagctggctgcctacgctcgtaaggctgctagacaagctagggccggtggcggaggtagcaagatcccaaacatcggtaacgtgatgaacaagttcgagatcctgggcgtggtcggtgaaggcgcttacggagtggtcctgaagtgcaggcacaaggagacccacgaaatcgtggccatcaagaagttcaaggactctgaggaaaacgaggaagtcaaagagaccactctgcgtgaactgaagatgctgaggactctgaagcaggagaacatcgtcgagctgaaggaagctttccgccgtaggggaaagctgtacctggtgttcgagtacgtcgaaaagaacatgctggagctgctggaggaaatgccaaacggtgtgcctcccgaaaaggtcaagagctacatctaccagctgatcaaggccatccactggtgccacaagaacgacatcgtgcaccgtgacatcaagcctgagaacctgctgatcagccacaacgacgtcctgaagctgtgcgacttcggtttcgctaggaacctgtctgagggcaacaacgctaactacactgaatacgtggccacccgttggtacaggtctccagagctgctgctgggtgccccttacggcaagtctgtggacatgtggtctgtcggatgcatcctgggtgaactgagcgacggacagcccctgttcccaggagagtctgaaatcgaccagctgttcaccatccagaaggtcctgggccccctgccaagcgagcagatgaagctgttctactctaacccccgtttccacggactgaggttccctgctgtgaaccacccccagagcctggaaagacgctacctgggtatcctgaactctgtcctgctggacctgatgaagaacctgctgaagctggaccctgctgaccgctacctgaccgagcagtgcctgaaccaccccactttccagacccagagactgctggaccgcagcccctctcgttcagccaagaggaagccataccacgtggaatccagcaccctgagcaaccgtaaccaggctggcaagtccactgccctgcagagccaccacaggtccaacagcaaggacatccaaaacctgtcagtgggactgccaagggctgacgagggactgccagccaacgaatccttcctgaacggcaacctggctggagcctctctgtcaccactgcacactaagacctaccaggcttcttcacagcctggttccactagcaaggacctgaccaacaacaacatcccacacctgctgtctcctaaggaagctaaatcaaagaccgagttcgacttcaacatcgaccctaagccctccgagggacctggtactaagtacctgaagtctaactcaagatcccagcagaaccgccactcattcatggagtccagccagtccaaggctggtaccctgcagcccaacgaaaagcagtcccgccacagctacatcgacaccatccctcagtcttcacgtagcccctcttacaggactaaggctaagagccacggcgccctgtcagactccaagagcgtgtctaacctgtctgaggctagagcccagatcgccgaaccttcaacctcccgctacttcccctccagctgcctggacctgaactctcccacttcaccaactcctaccagacactccgacactcgcaccctgctgagcccatctggtagaaacaaccgcaacgagggcaccctggactcacgtaggaccactacccgtcactccaagactatggaggaactgaagctgccagagcacatggactcttcacactcacactccctgagcgctcctcacgaatctttctcatacggcctgggatacaccagcccattctccagccagcagcgtcctcacaggcactctatgtacgtgactagagacaaggtccgcgctaagggactggacggttccctgtctatcggtcagggaatggctgctagggccaactctctgcagctgctgtcaccccagccaggagagcagctgccacctgaaatgaccgtggctagatcttcagtcaaggagacttcccgcgaaggcacctccagcttccacactagacagaagtcagagggcggagtgtaccacgaccctcactctgacgacggaactgctcccaaggaaaaccgccacctgtacaacgaccctgtgcccagacgcgtcggatccttctaccgtgtcccaagccctaggcccgacaactctttccacgagaacaacgtgagcaccagagtctcttcactgccctctgaatccagctctggcactaaccactcaaagcgccagcctgctttcgacccctggaagtccccagagaacatctctcactcagaacagctgaaggagaaggaaaagcagggattcttccgctcaatgaagaagaagaagaagaagtcccagaccgtgcccaactccgacagcccagacctgctgaccctgcagaagtcaatccactctgcctcaactccttcatccagacccaaggagtggcgccccgaaaagatctccgacctgcagactcagtcccagccactgaagagcctgcgtaagctgctgcacctgagctctgcttccaaccaccctgcctcatccgacccacgtttccagcctctgactgctcagcagaccaagaactccttcagcgagatcaggatccacccactgtcccaggctagcggtggcagctctaacatccgtcaggaaccagctcctaagggacgtccagctctgcagctgcctggtcagatggacccaggctggcacgtgtcatccgtcactagatcagctaccgagggaccatcttactcagaacagctgggtgccaagtcaggccccaacggacacccatacaaccgcaccaaccgttccaggatgcctaacctgaacgacctgaaggagactgctctgggggccggaggtggcggatccctggaagtgctgttccagggccctgactacaaggaccacgacggtgactacaaagatcacgacatcgactacaaggacgacgacgacaaggacggtgccccacaccaccaccaccaccacgaagatcaggtggatcctcgcctgatcgatggcaagtaa

SEQ ID NO: 176 - protein, 1109 aa, Artificial Sequence
  TwinStrep-3cV2-TATkappa28-hCDKL5-Flag-His-TwinStrep (Amino Acid Sequence)
MSAWSHPQFEKGGGSGGGSGGSAWSHPQFEKGSLEVLFQGPDAAQPARRARRTKLAAYARKAARQARAGGGGSKIPNIGNVMNKFEILGVVGEGAYGVVLKCRHKETHEIVAIKKFKDSEENEEVKETTLRELKMLRTLKQENIVELKEAFRRRGKLYLVFEYVEKNMLELLEEMPNGVPPEKVKSYIYQLIKAIHWCHKNDIVHRDIKPENLLISHNDVLKLCDFGFARNLSEGNNANYTEYVATRWYRSPELLLGAPYGKSVDMWSVGCILGELSDGQPLFPGESEIDQLFTIQKVLGPLPSEQMKLFYSNPRFHGLRFPAVNHPQSLERRYLGILNSVLLDLMKNLLKLDPADRYLTEQCLNHPTFQTQRLLDRSPSRSAKRKPYHVESSTLSNRNQAGKSTALQSHHRSNSKDIQNLSVGLPRADEGLPANESFLNGNLAGASLSPLHTKTYQASSQPGSTSKDLTNNNIPHLLSPKEAKSKTEFDFNIDPKPSEGPGTKYLKSNSRSQQNRHSFMESSQSKAGTLQPNEKQSRHSYIDTIPQSSRSPSYRTKAKSHGALSDSKSVSNLSEARAQIAEPSTSRYFPSSCLDLNSPTSPTPTRHSDTRTLLSPSGRNNRNEGTLDSRRTTTRHSKTMEELKLPEHMDSSHSHSLSAPHESFSYGLGYTSPFSSQQRPHRHSMYVTRDKVRAKGLDGSLSIGQGMAARANSLQLLSPQPGEQLPPEMTVARSSVKETSREGTSSFHTRQKSEGGVYHDPHSDDGTAPKENRHLYNDPVPRRVGSFYRVPSPRPDNSFHENNVSTRVSSLPSESSSGTNHSKRQPAFDPWKSPENISHSEQLKEKEKQGFFRSMKKKKKKSQTVPNSDSPDLLTLQKSIHSASTPSSRPKEWRPEKISDLQTQSQPLKSLRKLLHLSSASNHPASSDPRFQPLTAQQTKNSFSEIRIHPLSQASGGSSNIRQEPAPKGRPALQLPGQMDPGWHVSSVTRSATEGPSYSEQLGAKSGPNGHPYNRTNRSRMPNLNDLKETALGAGGGGSLEVLFQGPDYKDHDGDYKDHDIDYKDDDDKDGAPHHHHHHSAWSHPQFEKGGGSGGGSGGSAWSHPQFEK

SEQ ID NO: 177 - DNA, 3330 bp, Artificial Sequence
  TwinStrep-3cV2-TATkappa28-hCDKL5-Flag-His-TwinStrep (DNA Sequence)
atgtcagcgtggtcgcatcctcaattcgaaaagggcggcggttcgggtggaggaagtggcggatcggcctggtctcacccgcaattcgaaaagggttccctcgaggtcctgtttcagggccccgacgctgctcagcctgctcgccgtgccaggagaaccaagctggctgcctacgctcgtaaggctgctagacaagctagggccggtggcggaggtagcaagatcccaaacatcggtaacgtgatgaacaagttcgagatcctgggcgtggtcggtgaaggcgcttacggagtggtcctgaagtgcaggcacaaggagacccacgaaatcgtggccatcaagaagttcaaggactctgaggaaaacgaggaagtcaaagagaccactctgcgtgaactgaagatgctgaggactctgaagcaggagaacatcgtcgagctgaaggaagctttccgccgtaggggaaagctgtacctggtgttcgagtacgtcgaaaagaacatgctggagctgctggaggaaatgccaaacggtgtgcctcccgaaaaggtcaagagctacatctaccagctgatcaaggccatccactggtgccacaagaacgacatcgtgcaccgtgacatcaagcctgagaacctgctgatcagccacaacgacgtcctgaagctgtgcgacttcggtttcgctaggaacctgtctgagggcaacaacgctaactacactgaatacgtggccacccgttggtacaggtctccagagctgctgctgggtgccccttacggcaagtctgtggacatgtggtctgtcggatgcatcctgggtgaactgagcgacggacagcccctgttcccaggagagtctgaaatcgaccagctgttcaccatccagaaggtcctgggccccctgccaagcgagcagatgaagctgttctactctaacccccgtttccacggactgaggttccctgctgtgaaccacccccagagcctggaaagacgctacctgggtatcctgaactctgtcctgctggacctgatgaagaacctgctgaagctggaccctgctgaccgctacctgaccgagcagtgcctgaaccaccccactttccagacccagagactgctggaccgcagcccctctcgttcagccaagaggaagccataccacgtggaatccagcaccctgagcaaccgtaaccaggctggcaagtccactgccctgcagagccaccacaggtccaacagcaaggacatccaaaacctgtcagtgggactgccaagggctgacgagggactgccagccaacgaatccttcctgaacggcaacctggctggagcctctctgtcaccactgcacactaagacctaccaggcttcttcacagcctggttccactagcaaggacctgaccaacaacaacatcccacacctgctgtctcctaaggaagctaaatcaaagaccgagttcgacttcaacatcgaccctaagccctccgagggacctggtactaagtacctgaagtctaactcaagatcccagcagaaccgccactcattcatggagtccagccagtccaaggctggtaccctgcagcccaacgaaaagcagtcccgccacagctacatcgacaccatccctcagtcttcacgtagcccctcttacaggactaaggctaagagccacggcgccctgtcagactccaagagcgtgtctaacctgtctgaggctagagcccagatcgccgaaccttcaacctcccgctacttcccctccagctgcctggacctgaactctcccacttcaccaactcctaccagacactccgacactcgcaccctgctgagcccatctggtagaaacaaccgcaacgagggcaccctggactcacgtaggaccactacccgtcactccaagactatggaggaactgaagctgccagagcacatggactcttcacactcacactccctgagcgctcctcacgaatctttctcatacggcctgggatacaccagcccattctccagccagcagcgtcctcacaggcactctatgtacgtgactagagacaaggtccgcgctaagggactggacggttccctgtctatcggtcagggaatggctgctagggccaactctctgcagctgctgtcaccccagccaggagagcagctgccacctgaaatgaccgtggctagatcttcagtcaaggagacttcccgcgaaggcacctccagcttccacactagacagaagtcagagggcggagtgtaccacgaccctcactctgacgacggaactgctcccaaggaaaaccgccacctgtacaacgaccctgtgcccagacgcgtcggatccttctaccgtgtcccaagccctaggcccgacaactctttccacgagaacaacgtgagcaccagagtctcttcactgccctctgaatccagctctggcactaaccactcaaagcgccagcctgctttcgacccctggaagtccccagagaacatctctcactcagaacagctgaaggagaaggaaaagcagggattcttccgctcaatgaagaagaagaagaagaagtcccagaccgtgcccaactccgacagcccagacctgctgaccctgcagaagtcaatccactctgcctcaactccttcatccagacccaaggagtggcgccccgaaaagatctccgacctgcagactcagtcccagccactgaagagcctgcgtaagctgctgcacctgagctctgcttccaaccaccctgcctcatccgacccacgtttccagcctctgactgctcagcagaccaagaactccttcagcgagatcaggatccacccactgtcccaggctagcggtggcagctctaacatccgtcaggaaccagctcctaagggacgtccagctctgcagctgcctggtcagatggacccaggctggcacgtgtcatccgtcactagatcagctaccgagggaccatcttactcagaacagctgggtgccaagtcaggccccaacggacacccatacaaccgcaccaaccgttccaggatgcctaacctgaacgacctgaaggagactgctctgggggccggaggtggcggatccctggaagtgcttttccaaggtcccgactacaaggaccacgacggtgactacaaagatcacgacatcgactacaaggacgacgacgacaaggacggtgccccacaccaccaccaccaccactctgcatggtcgcatcctcaattcgagaaggggggtggcagcggagggggttccggcggatcagcctggagtcacccacagtttgaaaaataa

1. A composition comprising:
a gene therapy delivery system; and
a CDKL5 polynucleotide encoding a CDKL5 polypeptide, wherein the CDKL5 polypeptide has at least 98% sequence identity to SEQ ID NO: 1, SEQ ID NO: 2, SEQ ID NO: 3, SEQ ID NO: 4, SEQ ID NO: 5, SEQ ID NO: 6, SEQ ID NO: 7, SEQ ID NO: 8, SEQ ID NO: 9, SEQ ID NO: 10, SEQ ID NO: 11, SEQ ID NO: 12, SEQ ID NO: 13, SEQ ID NO: 14, SEQ ID NO: 15, SEQ ID NO: 16, SEQ ID NO: 17, SEQ ID NO: 18, SEQ ID NO: 19, SEQ ID NO: 20, SEQ ID NO: 21, SEQ ID NO: 22, SEQ ID NO: 23, SEQ ID NO: 24, SEQ ID NO: 25 or SEQ ID NO: 26.

2. The composition of claim 1, wherein the CDKL5 polypeptide has at least 98% sequence identity to SEQ ID NO: 1 or SEQ ID NO: 26.

3. The composition of claim 1, wherein the CDKL5 polynucleotide has at least 90% sequence identity to SEQ ID NO: 123.

4. The composition of claim 1, wherein the CDKL5 polypeptide has at least 98% sequence identity to SEQ ID NO: 2, SEQ ID NO: 3, SEQ ID NO: 4, SEQ ID NO: 5, SEQ ID NO: 6, SEQ ID NO: 7, SEQ ID NO: 8, SEQ ID NO: 9, SEQ ID NO: 10, SEQ ID NO: 11, or SEQ ID NO: 12.

5. The composition of claim 1, wherein the CDKL5 polypeptide has at least 98% sequence identity to SEQ ID NO: 13, SEQ ID NO: 14, SEQ ID NO: 15, SEQ ID NO: 16, SEQ ID NO: 17, SEQ ID NO: 18, SEQ ID NO: 19, SEQ ID NO: 20, SEQ ID NO: 21, SEQ ID NO: 22, SEQ ID NO: 23, SEQ ID NO: 24 or SEQ ID NO: 25.

6. The composition of claim 1, wherein the CDKL5 polynucleotide has at least 90% sequence identity to SEQ ID NO: 125, SEQ ID NO: 127, SEQ ID NO: 129, SEQ ID NO: 131, SEQ ID NO: 133, SEQ ID NO: 135, SEQ ID NO: 137, SEQ ID NO: 139, SEQ ID NO: 141, SEQ ID NO: 143, SEQ ID NO: 145, SEQ ID NO: 147 or 1 SEQ ID NO: 149.

7. The composition of claim 1, wherein the gene therapy delivery system comprises one or more of a viral vector, a liposome, a lipid-nucleic acid nanoparticle, an exosome and a gene editing system.

8. The composition of claim 7, wherein the gene editing system comprises one or more of Clustered Regularly Interspaced Short Palindromic Repeat (CRISPR) associated protein 9 (CRISPR-Cas-9), Transcription activator-like effector nuclease (TALEN) or ZNF (Zinc finger protein).

9. (canceled)

10. The composition of claim 1, wherein the gene therapy delivery system comprises a viral vector comprising one or more of an adenoviral vector, an adeno-associated viral vector, a lentiviral vector, a retroviral vector, a poxviral vector or a herpes simplex viral vector.

11. The composition of claim 9, wherein the viral vector comprises a viral polynucleotide operably linked to the CDKL5 polynucleotide.

12. The composition of claim 11, wherein the viral vector comprises at least one inverted terminal repeat (ITR).

13. The composition of claim 11, further comprising one or more of an SV40 intron, a polyadenylation signal or a stabilizing element.

14. The composition of claim 11, further comprising a promoter.

15. The composition of claim 14, wherein the promoter has at least 90% sequence identity to SEQ ID NO: 29 or SEQ ID NO: 30.

16. The composition of claim 1, further comprising a polynucleotide encoding a cell-penetrating polypeptide.

17. The composition of claim 16, wherein the cell-penetrating polypeptide has at least 90% sequence identity to SEQ ID NO: 32, SEQ ID NO: 34, SEQ ID NO: 35, SEQ ID NO: 36, SEQ ID NO: 37 or SEQ ID NO: 167.

18. (canceled)

19. The composition of claim 1, further comprising a polynucleotide encoding a leader signal polypeptide.

20. The composition of claim 19, wherein the leader signal polypeptide has at least 90% sequence identity to SEQ ID NO: 38, SEQ ID NO: 39, SEQ ID NO: 40, SEQ ID NO: 41, SEQ ID NO: 42, SEQ ID NO: 156, SEQ ID NO: 157, SEQ ID NO: 158, SEQ ID NO: 159, SEQ ID NO: 160, SEQ ID NO: 161, SEQ ID NO: 162, SEQ ID NO: 163, SEQ ID NO: 164, SEQ ID NO: 165, SEQ ID NO: 166 or SEQ ID NO: 168.

21. (canceled)

22. A pharmaceutical formulation comprising the composition of claim 1; and a pharmaceutically acceptable carrier.

23. A method of treating a CDKL5-mediated neurological disorder, the method comprising administering the formulation of claim 22 to a patient in need thereof.

24-77. (canceled)
